(19) United States
(12) Patent Application Publication
(10) Pub. No.: US 2014/0137294 A1
(43) Pub. Date: May 15, 2014

(54) GLUCOSINOLATE TRANSPORTER PROTEIN AND USES THEREOF

(71) Applicants: Peter Denolf, Velzeke (BE); Christiane Opsomer, Nieuwpoort (BE); Barbara Ann Halkier, Copenhagen K (DK); Hussam Hassan Nour-Eldin Auis, Copenhagen K (DK); Tonni Grube Andersen, Frederiksberg (DK); Svend Roesen Madsen, Copenhagen O (DK); Morten Egevang Jørgensen, Copenhagen S (DK)

(72) Inventors: Peter Denolf, Velzeke (BE); Christiane Opsomer, Nieuwpoort (BE); Barbara Ann Halkier, Copenhagen K (DK); Hussam Hassan Nour-Eldin Auis, Copenhagen K (DK); Tonni Grube Andersen, Frederiksberg (DK); Svend Roesen Madsen, Copenhagen O (DK); Morten Egevang Jørgensen, Copenhagen S (DK)

(73) Assignees: UNIVERSITY OF COPENHAGEN, Copenhagen K. (DK); BAYER CROPSCIENCE NV, Diegem (BE)

(21) Appl. No.: 13/808,024

(22) PCT Filed: Jul. 6, 2011
(86) PCT No.: PCT/EP2011/004565

§ 371 Date: Jan. 2, 2013

Related U.S. Application Data
(60) Provisional application No. 61/362,390, filed on Jul. 8, 2010.

(30) Foreign Application Priority Data
Jul. 12, 2010 (EP) 10075299.7

(51) Int. Cl. C12N 15/82; A01H 5/10; C07K 14/415

(52) U.S. Cl. CPC C12N 15/8218; C07K 14/415; C12N 15/8251; A01H 5/10
USPC 800/285; 536/23.6; 530/379; 536/23.1; 504/241; 800/306

(57) ABSTRACT

Methods and means to alter the glucosinolate (GSL) content in plants, in particular in specific plant parts, by modifying glucosinolate transporter protein (GTR) activity in plants or parts thereof are herein described. In particular, methods are provided to decrease GSL content of plant seed and meal thereof, as well as methods to increase GSL content in green plant tissue, of Brassicales plants.

### FIELD OF THE INVENTION

[0001] The present invention relates to the field of agricultural products, especially crop plants and parts thereof having a modified glucosinolate content. Provided are methods to alter the glucosinolate (GSL) content in plants, in particular in specific plant parts, by modifying glucosinolate transporter protein (GTR) activity in plants or parts thereof. Such modification of GTR activity may be achieved through down-regulation or up-regulation of GTR gene expression or GTR protein activity. In particular, methods are provided to decrease GSL content of plant seed and meal thereof, as well as methods to increase GSL content in green plant tissue, of Brassicales plants, particularly of Brassicaceae plants such as oilseed forms of Brassica spp. (including e.g. B. napus, B. juncea and B. carinata), B. oleracea, B. rapa, cruciferous salads (including e.g. Eruca sativa and Diplotaxis tenuifolia) and Raphanus (including e.g. Raphanus sativa).

### BACKGROUND OF THE INVENTION

[0002] The Brassicales or Capparales order of plants, including the Brassicaceae or Cruciferae family, includes many cultivars that have provided mankind with a source of condiments, vegetables, forage crops, and the economically important crops rapeseed (Brassica napus and Brassica campestris or rapa) and mustard (Brassica juncea).

[0003] A striking and characteristic chemical property of these plants is their high content of glucosinolates, amino acid-derived natural plant products containing a thioglucose and a sulfonated oxime. These sulphur-containing secondary metabolites, although considered non-toxic per se, are important because of the multiplicity of physiologically active products, such as nitriles, epithionitriles, oxazolidine-2-thiones, thiocyanates and isothiocyanates, derived from them upon cleavage by the hydrolytic enzyme myrosinase (thioglucoside glucohydrolase; EC 3.2.3.1) upon plant damage (Halkier and Gershenzon, 2006, Annual Review of Plant Biology 57: 303-333).

[0004] For plants, the glucosinolate/myrosinase system protects against herbivore attacks, and is implicated in host-plant recognition by specialized predators. For humans, glucosinolates (or rather their hydrolysis products) have received increased attention as cancer-preventive agents, flavor compounds, and potential biopesticides.

[0005] Glucosinolates are present in all parts of the plant. The level of glucosinolates varies in different tissues at different developmental stages (Fieldsend and Milford, 1994, Ann. Appl. Biol. 124: 531-542; Porter et al., 1991, Ann. Appl. Biol. 118: 461-467) and is affected by external factors such as growth conditions (Zhao et al., 1993, J. Sci. Food Agric. 63: 29-37; Zhao et al., 1994, J. Sci. Food Agric. 64, 295-304), wounding (Bodnaryk, 1992, Phytochemistry 31: 2671-2677), fungal infection (Doughty et al., 1991, Ann. Appl. Biol. 118: 469-477), actual and simulated insect damage (Bodnaryk, 1992, Phytochemistry 31: 2671-2677; Koritsas et al., 1991, Ann. Appl. Biol. 118: 209-221), and other forms of stress (Mithen, 1992, Euphytica 63: 71-83). Consistent with a prominent function in plant defense, the highest glucosinolate concentrations are found in reproductive organs, including seeds, siliques, flowers and developing inflorescences, followed by young leaves, the root system and fully expanded leaves.

[0006] Glucosinolates are known to be transported in the plant from maternal tissue across several apoplastic barriers from leaves and siliques via the phloem and into embryos, where they accumulate to high levels (reviewed in Nour-Eldin and Halkier, 2009, Phytochem Rev 8: 53-67). The molecular mechanism for this transport is unknown. The transport properties of glucosinolates within plants are of interest as identification of the mechanism of transport could, for example, lead to lower levels being obtained in seeds and seed meal thereof.

[0007] Methods of plant transporter discovery are described based on homology and yeast functional complementation. However, these methods represent a limitation when identifying transporters with no known homologues or when no auxotrophic yeast strains can be engineered. Nour-Eldin (Ph. D. thesis, University of Copenhagen, Faculty of Life Sciences, Department of Plant Biology, Plant Biochemistry Laboratory, 2007, 72 p.) describes a method of plant transporter discovery based on a functional genomics approach. A normalized library of Arabidopsis secondary metabolite transporters was constructed and screened in a high-throughput manner in Xenopus oocytes. The transporter library was screened for uptake towards the aliphatic glucosinolate 4-methylthiobytyl (4-MTB) glucosinolate. Three Arabidopsis glucosinolate transporter genes were identified. Two of them (At3g47960 and At1g18880; hereinafter referred to as AtGTR1 and 3) belong to the nitrate/peptide transporter family, while the third gene (At1g71880; known as AtSUC1) belongs to the sucrose transporter family. The Arabidopsis sucrose transporter family contains 9 genes (Williams et al., 2000, Trends Plant Sci 5: 283-290), which have been shown to be broad specific and transport a variety of β-glucosides (Chandran et al., 2003, J Biol Chem 278: 44320-44325). AtSUC1, 2, 5, 8 and 9 were shown to transport 4-MTB in Xenopus oocytes at varying efficiencies (Nour-Eldin, 2007, supra). Seeds of AtSUC9 T-DNA knockout lines showed a significant reduction in four types of glucosinolates, whereas AtSUC1 knockout lines showed no difference in seed glucosinolate content (Andersen et al., 2nd Conference on Glucosinolates, May 24-27, 2009). Two additional AtGTR genes (At5g62680 and At1g69870; hereinafter referred to as AtGTR2 and AtGTR5) were identified based on homology and subsequently also shown to transport 4-MTB into Xenopus oocytes (Nour-Eldin, 2007, supra).

[0008] Among the oilseed crops currently dominating the world market, rapeseed stands out for two important reasons; its high levels of oil with excellent nutritional properties for humans, and a protein-rich seedcake meal, ideal for animal feed. Interest in reducing the levels of glucosinolates in seed results from the presence of bitter-tasting, toxic and goitrogenic degradation products which limit the incorporation of rape meal into non-ruminant animal feed (Thomson and Hughes, 1986, In Oilseed rape. Edited by Scarisbrick and Daniels. Collins, London, U.K. pp. 32-82).

[0009] Approaches to reduce glucosinolate levels in seed have thus far been through blocking biosynthetic pathways. Often, however, this approach is accompanied by adverse effects on plant fitness due to e.g. increased susceptibility to biotic or abiotic stresses.

[0010] In the 1970s, traditional breeding generated a multiple-loci-dependent B. napus cultivar with reduced glucosinolate content in all parts of the plant, including the seeds. This “00” (“double low”) variety and its descendants have subsequently become the most widely grown rapeseed cultivars across the northern hemisphere. The prolonged selection bottleneck caused by this single source has, however, created a limited genetic diversity for future B. napus breeding programs and limits interspecific hybridization. This poses a serious problem for B. napus breeders striving to improve yield and disease resistance as well as to introduce novel traits such as drought tolerance through interspecific hybridizations.

[0011] A further problem with “00” varieties is that the seeds, although low in glucosinolates, are not free of them. Pressed seed cake obtained from “00” varieties after the oil has been extracted will typically contain less than 18-24 micromoles of total glucosinolates (GSL) per gram of dry weight (as compared to traditional rapeseed meal that contains 120-150 pmol of total GSL per gram). For use in compound feed, palatability to ruminants sets the level of total GSL permitted at no more than 10-15 micromoles per gram of dry weight, meaning an animal feed could in theory be compounded almost entirely of “00” pressed seed cake if the seed cake is at the lower level of GSL content. However, it has recently been found that poultry and pigs are both much more sensitive to levels of GSLs than ruminants, and more than 2-4 micromoles GSL per gram of dry weight in the feed can severely affect reproductive efficiencies in these animals. A truly “zero GSL” variety would be of significant commercial advantage to animal feed compounders, producers of pressed seed cake and the growers by increasing quantities of seed cake that can be included in compound feeds and removing the need for continual monitoring of GSL levels in their products.

[0012] These and other problems are solved as hereinafter described in the different embodiments, examples and claims.

### SUMMARY OF THE INVENTION

[0013] The present invention relates to plants and plant parts, such as seed, seed meal, green plant tissue and root tissues, with modified total glucosinolate (GSL) content. Provided are methods to produce plants and plant parts with modified total GSL content by modification of functional glucosinolate transport protein (GTR) activity. In particular, methods are provided to produce seed with decreased total GSL content and methods to produce green plant tissue, such as leaf tissue, with increased total GSL content by reduction of functional GTR activity. Further provided is the use of GTR-encoding nucleic acid molecules to obtain modified GSL content in plants and plant parts, and the use of plants and plant parts with modified functional GTR activity, for example, in cancer-prevention, in pest management or in animal feeding.

[0014] In a first aspect of the invention reduction of functional GTR activity may be achieved through down-regulation of GTR gene expression. In one embodiment of the invention, a method is provided to modify total GSL content of plants and plant parts by introduction of an RNA molecule capable of down-regulating GTR gene expression, e.g. through introduction of a chimeric nucleic acid construct comprising a nucleotide region which upon expression yields such RNA molecule.

[0015] In one embodiment, GTR gene expression is down-regulated by introducing an RNA molecule comprising part of a GTR-encoding nucleotide sequence or a homologous sequence or by introducing a chimeric DNA encoding such RNA molecule. In another embodiment, GTR gene expression is down-regulated by introducing an antisense RNA molecule comprising a nucleotide sequence complementary to at least part of a GTR-encoding nucleotide or homologous sequence, or by introducing a chimeric DNA encoding such RNA molecule. In yet another embodiment, GTR gene expression is down-regulated by introducing a double-stranded RNA molecule comprising a sense and an antisense RNA region corresponding to and respectively complementary to at least part of a GTR gene sequence, which sense and antisense RNA region are capable of forming a double stranded RNA region with each other. In another embodiment, GTR gene expression can be down-regulated by introduction of a microRNA molecule (which may be processed from a pre-microRNA molecule) capable of guiding the cleavage of GTR mRNA. Again, microRNA molecules may be conveniently introduced into plant cells through expression from a chimeric DNA molecule encoding such miRNA, pre-miRNA or primary miRNA transcript.

[0016] In another embodiment of the invention, a method is provided to modify total GSL content of plants or plant parts by down-regulation of GTR gene expression through alteration of the nucleotide sequence of the endogenous GTR gene, such as e.g. alterations in regulatory signals including promoter sequence, intron processing signals, untranslated leader and trailer sequence or polyadenylation signal sequences.

[0017] In a second aspect of the invention, reduction of functional GTR activity may occur at the level of the GTR activity. In one embodiment of the invention, a method is provided to modify total GSL content of plants and plant parts by introduction of a chimeric nucleic acid construct encoding a protein capable of down-regulating GTR protein activity. In one embodiment, GTR protein activity may be down-regulated by expression of a dominant negative GTR gene. In another embodiment of the invention, GTR protein activity may be down-regulated by expression of a GTR-inactivating antibody. Functional GTR activity may also be modulated by changing the phosphorylation/deposphorylation status of GTR proteins. This can be achieved by using variant alleles of GTR encoding genes, whereby the phosphorylation sites are modified, as hereinafter described.

[0018] In another embodiment of the invention, a method is provided to modify total GSL content of plants or plant parts by down-regulation of GTR protein activity through alteration of the nucleotide sequence of the endogenous GTR gene e.g. through alterations in the coding region introducing insertions, deletions or substitutions of amino acids, truncations of the encoded protein or splice site mutations.

### BRIEF DESCRIPTION OF THE FIGURES

[0019] FIG. 1a: Unrooted phylogenetic tree of protein sequences in the Arabidopsis NRT1/PTR family. Protein sequences were retrieved from the ARAMEMNON plant membrane protein database (Schwacke et al., Plant Physiol. 131: 16-26). The At3g47960 (AtGTR1) protein subclade is marked with a bracket. Grey shading of circles reflects relative in vitro GSL uptake activity in Xenopus oocytes with white indicating zero uptake and black maximum uptake observed. Unmarked genes have not been tested. The phylogenetic relationship was inferred using the Neighbor-Joining method (Saitou and Nei, 1987, Mol Biol Evol. 4(4):406-25). The phylogenetic relationship was computed using the Poisson correction method (Zuckerkandl and Pauling, 1965, In Bryson V, Vogel HJ (eds), Academic Press, New York, pp 97-166). All positions containing gaps and missing data were eliminated from the dataset (Complete deletion option). There were a total of 300 positions in the final dataset. Phylogenetic analyses were conducted in MEGA4 (Tamura et al., 2007, Mol Biol Evol 24: 1596-1599).

[0020] FIG. 1b: Alignment of Arabidopsis GTR amino acid sequences. POT1-6_AT..p: AtGTR1-6 (SEQ ID Nos 2, 4, 6, 8, 10 and 12)

[0021] FIG. 1c: Alignment of Arabidopsis GTR amino acid sequences 1 to 6 including the N-terminal extension of 30 amino acids in GTR1 (SEQ ID Nos 142, 4, 6, 8, 10 and 12).

[0022] FIG. 2: 4-MTB uptake in Xenopus oocytes expressing BrGTR2-A2 proteins with substitutions of amino acids corresponding to the amino acid at position 126 (Gly to Arg), 145 (Gly to Arg), 192 (Glu to Lys), 229 (Trp to STOP) and 359 (Ser to Phe) of SEQ ID NO: 66 and wildtype BrGTR2-A2 protein. Assay conditions: 0.5 mM 4-MTB for one hour. Each bar is the mean of 4 replicates, error is standard deviation.

[0023] FIG. 3: Biochemical analysis of AtGTR1 and 2 mediated GSL transport in Xenopus oocytes. A and B, pH dependence of AtGTR-mediated GSL transport. A, AtGTR2 mediated 4-MTB uptake measured by LC-MS analysis of oocyte extracts, n=3 oocytes. B, AtGTR1 currents induced by 1 mM 4-MTB were measured at different membrane potentials at pH 5 (), pH 6 (♦), and pH 7 (▴). Currents were normalized to the current induced at pH 5 at −60 mV, error bars are SD, n=4 oocytes. C and D, kinetic analysis of AtGTR-mediated glucosinolate transport. Normalized glucosinolate dependent currents at a membrane potential of −60 mV are plotted against 4-MTB concentrations, line indicates a fit of the Michaelis-Menten equation to the data; error bars are SD. For AtGTR1 (n=6 oocytes); For AtGTR2 (n=5 oocytes). Each oocyte-dataset were normalized to current elicited at 100 μM 4-MTB. E and F, substrate specificity of AtGTRs. E, AtGTR1 and AtGTR2 uptake of 0.04 mM C-14 labeled pOHBG at pH 5 in the presence of 2 mM 4-MTB, 2 mM NO₃⁻, 2 mM glucose+2 mM SO₄⁻⁻, or a solution of 2 mM Ala-His+2 mM Asp-Ala+2 mM Gly-Leu+2 mM Ala-Phe+2 mM Gly-Glu+2 mM Gly-Gly-Gly, error bars are SD, n=8 oocytes. F, AtGTR1 currents induced by endogenous and exogenous glucosinolates, representative positive, negative and neutral dipeptides and two tripeptides Currents were normalized to the current induced by 100 μM 4-MTB at pH 5 clamped at −60 mV, error bars are SD, n=4 oocytes.

[0024] FIG. 4: Glucosinolate content in seeds from Arabidopsis wild type and GTR knockout plants. A-D, HPLC trace showing GSL content in total seeds from a representative silique from wildtype, atgtr1, atgtr2 and atgtr1/atgtr2 plants, respectively. A, 54 seeds from wildtype plants. B, 51 seeds from atgtr2. C, 53 seeds from atgtr1. D, 39 seeds from atgtr1/atgtr2 plants. E, 20 seeds from atgtr1/atgtr2 plant transformed with native AtGTR2 complementation construct. Abbreviations denote the prefix of detected glucosinolates. 4ohb: 4-hydroxybutyl-GSL, 4 msb: 4-methylsulfinylbutyl-GSL, 5msp: 5-methyldsulfinylpentyl-GSL, 6msh: 6 methylsulfinylhexyl-GSL, 7msh: 7-methylsulfinylheptyl-GSL, 4mtb: 4-methylthiobutyl-GSL, 8mso: 8-methylsulfinyl-GSL, i3m: indol-3-yl-methyl-GSL, 5mtp: 5-methylthiobutyl-GSL, 3bzop: 3-benzoylpropyl-GSL, 4bzob: 4-benzoylbutyl-GSL, 7mth: 7-methylthioheptyl-GSL, 8-methylthiooctyl-GSL. 2-propenyl-GSL: internal standard GSL, normalizing for loss during purification.

[0025] FIG. 5: Total aliphatic glucosinolate (abbreviated as “gls” on the Y-axis) content in different plant parts from soil grown Arabidopsis plants through development. Harvesting time points: before bolting: 3 week old plants, after bolting (and onset of silique development): 5 week old plants, senescence (and seed maturity): 8 week. For time points “after bolting” and “senescence” tissues are harvested from the same plants. A, seeds. B, rosette. C, Stems (including flowers), total cauline leaves, total intact siliques (including developing and mature seeds). D, Single silique walls. Bars represent mean±SD. (Total aliphatic GSLs include all methionine-derived GSLs including benzoyloxy-GSLs).

[0026] FIG. 6: Total aliphatic glucosinolate (abbreviated as “gls” on the Y-axis) content in different plant parts from hydroponically grown Arabidopsis plants through development. Harvesting time points as stated for soil grown plants in FIG. 2. A, roots. B, rosette bolting. C, aliphatic glucosinolate concentration per mg plant.

[0027] FIG. 7: Detail of alignment of part of Arabidopsis GTR amino acid sequences: AtGTR2: SEQ ID NO: 4 from amino acid position 454 to amino acid position 493; BrGTR2: SEQ ID NO: 26 from amino acid position 450 to amino acid position 489; AtGTR1: SEQ ID NO: 2 from amino acid position 440 to amino acid position 479 (or SEQ ID No 142 from amino acid position 470 to 509); AtGTR3: SEQ ID NO: 6 from amino acid position 438 to amino acid position 467; AtGTR5: SEQ ID NO: 10 from amino acid position 463 to amino acid position 495; AtGTR6: SEQ ID NO: 12 from amino acid position 423 to amino acid position 449; and AtGTR4: SEQ ID NO: 8 from amino acid position 425 to amino acid position 451.

[0028] FIG. 8: Predicted protein structure for GTR2 protein with relative indication of the mutations in the mutant BrnTR2 protein. The dashed arrow indicates a loop characteristic for GTR1, GTR2 and GTR3 proteins (also indicated by the boxed sequences in FIG. 7.

[0029] FIG. 9: 3-butenyl content in B. rapa seeds. The X-axis shows the BrGTR2-genotype of seeds; darker columns indicate seeds from homozygous mutants, whereas lighter columns indicate seeds from wild type segregants (WTS) for the respective mutations. WT represent unmutated reference wild type seeds. The Y-axis shows 3-butenyl concentration in nmol/mg. Panel A) Glucosinolate concentration of seeds from each plant; standard deviations are calculated from n=3 seeds. Panel B) Average glucosinolate concentration of all “W229X-” (stop codon) mutants, with standard deviations calculated from n=27 seeds, n=12 seeds and n=3seeds, respectively.

[0030] FIG. 10: Total glucosinolate content in mutant and reference B. napus seeds. The Y axis shows the genotype of the seeds. Reference are unmutated isogenic wild-type seeds.

[0031] FIG. 11: 4-MTB uptake of phosphorylation/dephosphorylation mimicking constructs in comparison with wild type At GTR1 and GTR2; X-axis represents the genotypes of the different constructs.

[0032] FIG. 12: Concentration of glucosinolates in various tissues in Brassica rapa. The X-axis shows plant part analyzed and the Y-axis shows nmol glucosinolate/mg freshweight. The analysis shows that glucosinolate concentration in entire Brgtr2 plants is higher than in WTs and that this increased concentration are caused by the glucosinolate levels in leaves and siliques, not stem and root. Standard deviations are calculated from n=5.

[0033] FIG. 13: Freshweight of various tissues. The X-axis shows plant part weighed and the Y-axis shows mg freshweight. The analysis shows that Brgtr2 plants are larger than the WTs, and that this increase is primarily caused by the weights of leaves and stem. It should be noted that the low weight of BrGTR2WT siliques is partly caused by a low amount of seeds in these compared to true WT and Brgtr2 siliques (data not shown). Standard deviations are calculated from n=5.

### GENERAL DEFINITIONS

[0034] “Glucosinolates” (abbreviated herein as “GSLs” or “GLSs”), as used herein, refers to amino acid-derived thioglucosidic organic anions comprising a sulfonated aldoxime moiety. A variable side chain depending on the parent amino acid and further side chain modifications gives the distinct chemical and biological properties for GSLs. Approximately 120 different GSLs have been described in the literature and they are all derived from only 8 different amino acids. The parent amino acids are conveniently used as a classification criteria. GSLs derived from Ala, Leu, Ile, Val and Met are called “aliphatic GSLs”, those derived from Tyr and Phe are called “aromatic GSLs” and those derived from Trp are called “indole GSLs”. The great variety in GSL types is caused by a number of modifications on the side chain of the parent amino acid. Especially, methionine undergoes a wide range of transformations. The predominant aliphatic GSLs in the Brassicaceae possess side chains derived from chain elongated forms of Met, such as aliphatic thio-GSLs 3-methylthiopropyl (3-MTP)-, 4-methylthiobutyl (4-MTB)-, 5-methylthiopentyl (5-MTP)-, 6-methylthiohexyl (6-MTH)-, 7-methylthioheptyl (7-MTH)- and 8-methylthiooctyl (8-MTO)-GSL; aliphatic sulfinyl-GSLs 3-methylsulfinylpropyl (3-MSP)-, 4-methylsulfinylbutyl (4-MSB)-, 5-methylsulfinylpentyl (5-MSP)-, 6-methylsulfinylhexyl (6-MSH)-, 7-methylsulfinylheptyl (7-MSH)- and 8-methylsulfinyloctyl (8-MSO)-GSL; aliphatic hydroxy-GSLs 3-hydroxypropyl (3-OHP)- and 4-hydroxybutyl (4-OHB)-GSL; aliphatic benzoyloxy-GSLs 3-benzoyloxypropyl (3-BZOP)- and 4-benzoyloxybutyl (4-BZOB)-GSL, and aliphatic alkenyl-GSLs 2-propenyl (2-P)- and 3-butenyl (3-B)-GSL. The predominant aromatic GSLs in the Brassicaceae possess side chains derived from Phe, such as aromatic GSL 2-phenylethyl (2-PE)-GSL. Lower amounts of GSLs with indolylic side chains derived from Trp, such as indol-GSL indol-3-ylmethyl (i3M)-GSL, also occur. GSLs co-occur in plants with the GSL-specific thioglucosidase myrosinase. This enzyme is physically separated from GSLs in plants, but is brought into contact with its substrate upon tissue disruption. The resulting hydrolysis product consists of one free glucose and one aglycone molecule per GSL molecule. The agclycones are unstable and readily rearrange into isothiocyanates, nitriles, thiocyanates and other more or less toxic compounds. Depending on the side chain of the parent amino acid these hydrolysis products contribute the actual biological activity of GSLs, while intact GSLs are believed to be an inactive storage form.

[0035] As used herein, “glucosinolate content” of a plant or plant part refers to the total of GSLs, including aliphatic, aromatic and indole GSLs, without regard to the type of GSLs. Thus the “total GSL content” or “GSL content” of a plant or plant part means the content of total GSLs of that plant or plant part and is expressed on a molecular (nmol/g or pmol/g) basis (rather than on a weight (mg/kg) basis) as GSLs have significantly different molecular weights depending on the size of their side chain. GSL accumulation varies between tissues and developmental stages. Young leaves and reproductive tissues such as siliques and seeds contain the highest concentrations while senescing leaves contain the lowest concentrations of GSLs. Intermediate concentrations are found throughout the “large” organs such as the roots, leaves and stem. In addition, the composition of the GSL profile varies markedly between organs. In roots and vegetative tissues, the GSL content is composed of indole and aliphatic GSLs while the aromatic are absent. In siliques and seeds, small amounts of aromatic and indole GSLs are found while the rest of the GSL content is entirely composed of aliphatic GSLs.

[0036] “Canola”, “double-zero rapeseed” or “double-low rapeseed” is an offspring of rapeseed (Brassica napus and Brassica campestris or rapa) which was bred through standard plant breeding techniques to have low levels of erucic acid (below 2%) in the oil portion and low levels of GSLs (below 30 pmol/g) in the meal portion. “Seed” of (double-zero) rapeseed is small and round, 1-2 mm in diameter. It contains approximately 42-43% oil, which is extracted for use as edible vegetable oil. The remaining “seed meal” is a widely used protein source in animal feeds. The GSLs in rapeseed were reduced because they are toxic and unpalatable to most animals, and therefore limit the inclusion level of rapeseed meal in animal feeds to very low levels. Canola and rapeseed meals are commonly used in animal feeds around the world and are sold in bulk form as a mash or in pellets.

[0037] A “decrease in total GSL content” or “increase in total GSL content” of a plant or plant part by the methods of the present invention is measured relative to the total GSL content of a reference plant or plant part with similar genetic background. Total GSL content can be measured by any appropriate method. Methods to quantify total GSL content and to determine GSL composition of plant material are well known in the art and include but are not limited to: HPLC-UV desulfo-method involving HPLC analysis of methanol extracts desulfated and eluted from sephadex anion exchange columns as described by, e.g., Hansen et al. (2007, Plant J. 50 (5): 902-910); analysis of intact GSLs by MALDI-TOF mass spectrometry as described by, e.g., Botting et al. (2002, J. Agric. Food Chem. 50 (5): 983-988); near-infrared reflectance spectroscopy as described by, e.g., Font et al. (2005, J. Agric. Sci. 143: 65-73); methods yielding spectrophotometrically active degradation products as summarized by, e.g., Clarke (2010, Anal. Methods 2: 310-325); HPLC mass spectrometry analysis of intact glucosinolates as described by, e.g., Rochfort et al. (2008, Phytochemistry 69: 1671).

[0038] “Biofumigation”, as used herein, refers to the use of GSL-containing plants, such as Brassicaceae (e.g. cabbage, cauliflower, kale and mustard), Capparidaceae (e.g. cleome) and Moringaceae (e.g. horse-radish) species, as biologically-active rotation and green manure crop for controlling several soil-borne pathogens and diseases.

[0039] “Crop plant” refers to plant species cultivated as a crop, such as Brassica napus (AACC, 2n=38), Brassica juncea (AABB, 2n=36), Brassica carinata (BBCC, 2n=34), Brassica rapa (syn. B. campestris) (AA, 2n=20), Brassica oleracea (CC, 2n=18) or Brassica nigra (BB, 2n=16). The definition does not encompass weeds, such as Arabidopsis thaliana.

[0040] The term “nucleic acid” or “nucleic acid molecule” refers to a DNA or RNA molecule in single or double stranded form, particularly a DNA encoding a protein or protein fragment according to the invention. An “endogenous nucleic acid” refers to a nucleic acid within a plant cell, e.g. an endogenous allele of a GTR gene present within the nuclear genome of a Brassica cell. An “isolated nucleic acid” is used to refer to a nucleic acid that is no longer in its natural environment, for example in vitro or in a recombinant bacterial or plant host cell.

[0041] The term “gene” means a DNA fragment comprising a DNA region (transcribed region), which is transcribed into an RNA molecule (e.g. into a pre-mRNA, comprising intron sequences, which is then spliced into a mature mRNA, or directly into a mRNA without intron sequences, or into a pre-miRNA) in a cell, operable linked to regulatory regions (e.g. a promoter). A gene may thus comprise several operably linked DNA fragments, such as a promoter, a 5′ leader sequence comprising e.g. sequences involved in translation initiation, a (protein) coding region (cDNA or genomic DNA) and a 3′ non-translated sequence comprising e.g. transcription termination sites. “Endogenous gene” is used to differentiate from a “foreign gene”, “transgene” or “chimeric gene”, and refers to a gene from a plant of a certain plant genus, species or variety, which has not been introduced into that plant by transformation (i.e. it is not a “transgene”), but which is normally present in plants of that genus, species or variety, or which is introduced in that plant from plants of another plant genus, species or variety, in which it is normally present, by normal breeding techniques or by somatic hybridization, e.g., by protoplast fusion. Similarly, an “endogenous allele” of a gene is not introduced into a plant or plant tissue by plant transformation, but is, for example, generated by plant mutagenesis and/or selection or obtained by screening natural populations of plants.

[0042] As used herein a “chimeric nucleic acid construct” refers to a nucleic acid construct which is not normally found in a plant species. A chimeric nucleic acid construct can be DNA or RNA. “Chimeric DNA construct” and “chimeric gene” are used interchangeably to denote a gene which is not normally found in a plant species or to refer to any gene in which the promoter or one or more other regulatory regions of the gene are not associated in nature with part or all of the transcribed DNA region.

[0043] “Expression of a gene” or “gene expression” refers to the process wherein a DNA region, which is operably linked to appropriate regulatory regions, particularly a promoter, is transcribed into an RNA molecule. The RNA molecule is then processed further (by post-transcriptional processes) within the cell, e.g. by RNA splicing and translation initiation and translation into an amino acid chain (polypeptide), and translation termination by translation stop codons. The term “functionally expressed” is used herein to indicate that a functional protein is produced; the term “not functionally expressed” to indicate that a protein with significantly reduced or no functionality (biological activity) is produced or that no protein is produced (see further below). An RNA molecule is biologically active when it is either capable of interaction with another nucleic acid or protein or which is capable of being translated into a biologically active polypeptide or protein. A gene is said to encode an RNA when the end product of the expression of the gene is biologically active RNA, such as e.g. an antisense RNA, a ribozyme, or a miRNA. A gene is said to encode a protein when the end product of the expression of the gene is a protein or polypeptide. A gene is said to encode a GTR-inhibitory RNA when the end product of the expression of the gene is capable of down-regulating GTR functional activity, i.e. capable of down-regulating GTR gene expression and/or GTR protein activity.

[0044] For the purpose of the invention, the term “plant-operative promoter” and “plant-expressible promoter” mean a promoter which is capable of driving transcription in a plant, plant tissue, plant organ, plant part, or plant cell. This includes any promoter of plant origin, but also any promoter of non-plant origin which is capable of directing transcription in a plant cell.

[0045] Promoters that may be used in this respect are constitutive promoters, such as the promoter of the cauliflower mosaic virus (CaMV) 35S transcript (Harpster et al., 1988, Mol. Gen. Genet. 212: 182-190), the CaMV 19S promoter (U.S. Pat. No. 5,352,605; WO 84/02913; Benfey et al., 1989, EMBO J. 8:2195-2202), the subterranean clover virus promoter No 4 or No 7 (WO 96/06932), the Rubisco small subunit promoter (U.S. Pat. No. 4,962,028), the ubiquitin promoter (Holtorf et al., 1995, Plant Mol. Biol. 29:637-649), T-DNA gene promoters such as the octopine synthase (OCS) and nopaline synthase (NOS) promoters from Agrobacterium, and further promoters of genes whose constitutive expression in plants is known to the person skilled in the art.

[0046] Further promoters that may be used in this respect are tissue-specific or organ-specific promoters, preferably seed-specific promoters, such as the 2S albumin promoter (Joseffson et al., 1987, J. Biol. Chem. 262:12196-12201), the phaseolin promoter (U.S. Pat. No. 5,504,200; Bustos et al., 1989, Plant Cell 1.(9):839-53), the legumine promoter (Shirsat et al., 1989, Mol. Gen. Genet. 215(2):326-331), the “unknown seed protein” (USP) promoter (Baumlein et al., 1991, Mol. Gen. Genet. 225(3):459-67), the napin promoter (U.S. Pat. No. 5,608,152; Stalberg et al., 1996, Planta 199:515-519), the Arabidopsis oleosin promoter (WO 98/45461), the Brassica Bce4 promoter (WO 91/13980), and further promoters of genes whose seed-specific expression in plants is known to the person skilled in the art.

[0047] Other promoters that can be used are tissue-specific or organ-specific promoters like organ primordia-specific promoters (An et al., 1996, Plant Cell 8: 15-30), stem-specific promoters (Keller et al., 1988, EMBO J. 7(12): 3625-3633), leaf-specific promoters (Hudspeth et al., 1989, Plant Mol. Biol. 12: 579-589), mesophyl-specific promoters (such as the light-inducible Rubisco promoters), root-specific promoters (Keller et al., 1989, Genes Dev. 3: 1639-1646), tuber-specific promoters (Keil et al., 1989, EMBO J. 8(5): 1323-1330), vascular tissue-specific promoters (Peleman et al., 1989, Gene 84: 359-369), stamen-selective promoters (WO 89/10396, WO 92/13956), dehiscence zone-specific promoters (WO 97/13865), and the like.

[0048] Chimeric RNA constructs according to the invention may be delivered to plant cells using means and methods such as described in WO90/12107, WO03/052108 or WO2005/098004.

[0049] The terms “protein” or “polypeptide” are used interchangeably and refer to molecules consisting of a chain of amino acids, without reference to a specific mode of action, size, 3-dimensional structure or origin. A “fragment” or “portion” of a GTR protein may thus still be referred to as a “protein”. An “isolated protein” is used to refer to a protein that is no longer in its natural environment, for example in vitro or in a recombinant bacterial or plant host cell.

[0050] The term “transporter protein” is used to refer to a transmembrane protein that helps a certain substance or class of closely related substances to cross the membrane. A “glucosinolate transporter protein” (abbreviated herein as “GTR”) is a proton-dependent oligopeptide transporter (POT) protein involved in glucosinolate transport.

[0051] The term “GTR gene” refers herein to a nucleic acid sequence encoding a glucosinolate transporter (GTR) protein.

[0052] As used herein, the term “allele(s)” means any of one or more alternative forms of a gene at a particular locus. In a diploid (or amphidiploid) cell of an organism, alleles of a given gene are located at a specific location or locus (loci plural) on a chromosome. One allele is present on each chromosome of the pair of homologous chromosomes.

[0053] As used herein, the term “homologous chromosomes” means chromosomes that contain information for the same biological features and contain the same genes at the same loci but possibly different alleles of those genes. Homologous chromosomes are chromosomes that pair during meiosis. “Non-homologous chromosomes”, representing all the biological features of an organism, form a set, and the number of sets in a cell is called ploidy. Diploid organisms contain two sets of non-homologous chromosomes, wherein each homologous chromosome is inherited from a different parent. In amphidiploid species, essentially two sets of diploid genomes exist, whereby the chromosomes of the two genomes are referred to as “homeologous chromosomes” (and similarly, the loci or genes of the two genomes are referred to as homeologous loci or genes). A diploid, or amphidiploid, plant species may comprise a large number of different alleles at a particular locus.

[0054] As used herein, the term “heterozygous” means a genetic condition existing when two different alleles reside at a specific locus, but are positioned individually on corresponding pairs of homologous chromosomes in the cell. Conversely, as used herein, the term “homozygous” means a genetic condition existing when two identical alleles reside at a specific locus, but are positioned individually on corresponding pairs of homologous chromosomes in the cell.

[0055] As used herein, the term “locus” (loci plural) means a specific place or places or a site on a chromosome where for example a gene or genetic marker is found. For example, the “GTR-A1 locus” refers to the position on a chromosome of the A genome where the GTR-A1 gene (and two GTR-A1 alleles) may be found, while the“GTR-C1 locus” refers to the position on a chromosome of the C genome where the GTR-C1 gene (and two GTR-C1 alleles) may be found.

[0056] Whenever reference to a “plant” or “plants” according to the invention is made, it is understood that also plant parts, progeny of the plants which retain the distinguishing characteristics of the parents (especially the glucosinolate content in particular plant parts), such as seed obtained by selfing or crossing, e.g. hybrid seed (obtained by crossing two inbred parental lines), hybrid plants and plant parts derived thereof are encompassed herein, unless otherwise indicated.

[0057] “Plant parts”, as used herein, refers to any part of the plant, including plant cells, plant tissues, plant organs, siliques or seed pods, seeds, severed parts such as roots, leaves, flowers, pollen, etc.).

[0058] A “molecular assay” (or test) refers herein to an assay that indicates (directly or indirectly) the presence or absence of one or more particular GTR alleles at one or both GTR loci (e.g. at one or both of the GTR-A1 or GTR-C1 loci). In one embodiment it allows one to determine whether a particular (wild type or mutant) allele is homozygous or heterozygous at the locus in any individual plant.

[0059] “Wild type” (also written “wildtype” or “wild-type”), as used herein, refers to a typical form of a plant or a gene as it most commonly occurs in nature. A “wild type plant” refers to a plant with the most common phenotype of such plant in the natural population. A “wild type allele” refers to an allele of a gene required to produce the wild-type phenotype. By contrast, a “mutant plant” refers to a plant with a different rare phenotype of such plant in the natural population or produced by human intervention, e.g. by mutagenesis, and a “mutant allele” refers to an allele of a gene required to produce the mutant phenotype.

[0060] As used herein, the term “wild type GTR” (e.g. wild type GTR-A1 or GTR-C1), means a naturally occurring GTR allele found within plants, in particular Brassicaceae plants, especially Arabidopsis and Brassica plants, which encodes a functional GTR protein (e.g. a functional GTR-A1 or GTR-C1, respectively). In contrast, the term “mutant GTR” (e.g. mutant GTR-A1 or GTR-C1), as used herein, refers to an GTR allele, which does not encode a functional GTR protein, i.e. an GTR allele encoding a non-functional GTR protein (e.g. a non-functional GTR-A1 or GTR-C1, respectively), which, as used herein, refers to an GTR protein having no biological activity or a significantly reduced biological activity as compared to the corresponding wild-type functional GTR protein, or encoding no GTR protein at all. Such a “mutant GTR allele” (also called “full knock-out” or “null” allele) is a wild-type GTR allele, which comprises one or more mutations in its nucleic acid sequence, whereby the mutation(s) preferably result in a significantly reduced (absolute or relative) amount of functional GTR protein in the cell in vivo. Mutant alleles of the GTR protein-encoding nucleic acid sequences are designated as “gtr” (e.g. gtr-a1 or gtr-c1, respectively) herein. Mutant alleles can be either “natural mutant” alleles, which are mutant alleles found in nature (e.g. produced spontaneously without human application of mutagens) or “induced mutant” alleles, which are induced by human intervention, e.g. by mutagenesis.

[0061] A “significantly reduced amount of functional GTR protein” (e.g. functional GTR-A1 or GTR-C1 protein) refers to a reduction in the amount of a functional GTR protein produced by the cell comprising a mutant GTR allele by at least 30%, 40%, 50%, 60%, 70%, 80%, 90%, 95% or 100% (i.e. no functional GTR protein is produced by the cell) as compared to the amount of the functional GTR protein produced by the cell not comprising the mutant GTR allele. This definition encompasses the production of a “non-functional” GTR protein (e.g. truncated GTR protein) having no GSL transport activity in vivo, the reduction in the absolute amount of the functional GTR protein (e.g. no functional GTR protein being made due to the mutation in the GTR gene), and/or the production of an GTR protein with significantly reduced GSL transport activity compared to the activity of a functional wild type GTR protein (such as an GTR protein in which one or more amino acid residues that are crucial for the GSL transport activity of the encoded GTR protein, as exemplified below, are substituted for another amino acid residue). The term “mutant GTR protein”, as used herein, refers to an GTR protein encoded by a mutant GTR nucleic acid sequence (“gtr allele”) whereby the mutation results in a significantly reduced and/or no GTR activity in vivo, compared to the activity of the GTR protein encoded by a non-mutant, wild type GTR sequence (“GTR allele”).

[0062] “Mutagenesis”, as used herein, refers to the process in which plant cells (e.g., a plurality of Brassica seeds or other parts, such as pollen, etc.) are subjected to a technique which induces mutations in the DNA of the cells, such as contact with a mutagenic agent, such as a chemical substance (such as ethylmethylsulfonate (EMS), ethylnitrosourea (ENU), etc.) or ionizing radiation (neutrons (such as in fast neutron mutagenesis, etc.), alpha rays, gamma rays (such as that supplied by a Cobalt 60 source), X-rays, UV-radiation, etc.), or a combination of two or more of these. Thus, the desired mutagenesis of one or more GTR alleles may be accomplished by use of chemical means such as by contact of one or more plant tissues with ethylmethylsulfonate (EMS), ethylnitrosourea, etc., by the use of physical means such as x-ray, etc, or by gamma radiation, such as that supplied by a Cobalt 60 source. While mutations created by irradiation are often large deletions or other gross lesions such as translocations or complex rearrangements, mutations created by chemical mutagens are often more discrete lesions such as point mutations. For example, EMS alkylates guanine bases, which results in base mispairing: an alkylated guanine will pair with a thymine base, resulting primarily in G/C to A/T transitions.

[0063] As used herein, the term “non-naturally occurring” when used in reference to a plant, means a plant with a genome that has been modified by man. A transgenic plant, for example, is a non-naturally occurring plant that contains an exogenous nucleic acid molecule, e.g., a chimeric gene comprising a transcribed region which when transcribed yields a biologically active RNA molecule capable of reducing the expression of an endogenous gene, such as an GTR gene according to the invention, and, therefore, has been genetically modified by man. In addition, a plant that contains a mutation in an endogenous gene, for example, a mutation in an endogenous GTR gene, (e.g. in a regulatory element or in the coding sequence) as a result of an exposure to a mutagenic agent is also considered a non-naturally plant, since it has been genetically modified by man. Furthermore, a plant of a particular species, such as Brassica that contains mutation in an endogenous gene, for example, in an endogenous GTR gene, that in nature does not occur in that particular plant species, as a result of, for example, directed breeding processes, such as marker-assisted breeding and selection or introgression, with a plant of the same or another species, such as Brassica juncea or rapa, of that plant is also considered a non-naturally occurring plant. In contrast, a plant containing only spontaneous or naturally occurring mutations, i.e. a plant that has not been genetically modified by man, is not a “non-naturally occurring plant” as defined herein and, therefore, is not encompassed within the invention. One skilled in the art understands that, while a non-naturally occurring plant typically has a nucleotide sequence that is altered as compared to a naturally occurring plant, a non-naturally occurring plant also can be genetically modified by man without altering its nucleotide sequence, for example, by modifying its methylation pattern.

[0064] The term “ortholog” of a gene or protein refers herein to the homologous gene or protein found in another species, which has the same function as the gene or protein, but is (usually) diverged in sequence from the time point on when the species harboring the genes diverged (i.e. the genes evolved from a common ancestor by speciation). Orthologs of, for example, the Brassica napus GTR genes may thus be identified in other plant species (e.g. Brassica juncea, etc.) based on both sequence comparisons (e.g. based on percentages sequence identity over the entire sequence or over specific domains) and/or functional analysis.

[0065] A “variety” is used herein in conformity with the UPOV convention and refers to a plant grouping within a single botanical taxon of the lowest known rank, which grouping can be defined by the expression of the characteristics resulting from a given genotype or combination of genotypes, can be distinguished from any other plant grouping by the expression of at least one of the said characteristics and is considered as a unit with regard to its suitability for being propagated unchanged (stable).

[0066] The term “comprising” is to be interpreted as specifying the presence of the stated parts, steps or components, but does not exclude the presence of one or more additional parts, steps or components. A plant comprising a certain trait may thus comprise additional traits. A nucleic acid or protein comprising a sequence of nucleotides or amino acids, may comprise more nucleotides or amino acids than the actually cited ones, i.e., be embedded in a larger nucleic acid or protein. A chimeric gene comprising a DNA region which is functionally or structurally defined may comprise additional DNA regions etc.

[0067] It is understood that when referring to a word in the singular (e.g. plant or root), the plural is also included herein (e.g. a plurality of plants, a plurality of roots). Thus, reference to an element by the indefinite article “a” or “an” does not exclude the possibility that more than one of the element is present, unless the context clearly requires that there be one and only one of the elements. The indefinite article “a” or “an” thus usually means “at least one”.

[0068] For the purpose of this invention, the “sequence identity” of two related nucleotide or amino acid sequences, expressed as a percentage, refers to the number of positions in the two optimally aligned sequences which have identical residues (×100) divided by the number of positions compared. A gap, i.e., a position in an alignment where a residue is present in one sequence but not in the other, is regarded as a position with non-identical residues. The “optimal alignment” of two sequences is found by aligning the two sequences over the entire length according to the Needleman and Wunsch global alignment algorithm (Needleman and Wunsch, 1970, J Mol Biol 48(3):443-53) in The European Molecular Biology Open Software Suite (EMBOSS, Rice et al., 2000, Trends in Genetics 16(6): 276-277; see e.g. http://www.ebi.ac.uk/emboss/align/index.html) using default settings (gap opening penalty=10 (for nucleotides)/10 (for proteins) and gap extension penalty=0.5 (for nucleotides)/0.5 (for proteins)). For nucleotides the default scoring matrix used is EDNAFULL and for proteins the default scoring matrix is EBLOSUM62.

[0069] It will be clear that whenever nucleotide sequences of RNA molecules are defined by reference to nucleotide sequence of corresponding DNA molecules, the thymine (T) in the nucleotide sequence should be replaced by uracil (U). Whether reference is made to RNA or DNA molecules will be clear from the context of the application.

[0070] “Substantially identical” or “essentially similar”, as used herein, refers to sequences, which, when optimally aligned as defined above, share at least a certain minimal percentage of sequence identity (as defined further below).

[0071] “Stringent hybridization conditions” can be used to identify nucleotide sequences, which are substantially identical to a given nucleotide sequence. Stringent conditions are sequence dependent and will be different in different circumstances. Generally, stringent conditions are selected to be about 5° C. lower than the thermal melting point (Tₘ) for the specific sequences at a defined ionic strength and pH. The Tₘ is the temperature (under defined ionic strength and pH) at which 50% of the target sequence hybridizes to a perfectly matched probe. Typically stringent conditions will be chosen in which the salt concentration is about 0.02 molar at pH 7 and the temperature is at least 60° C. Lowering the salt concentration and/or increasing the temperature increases stringency. Stringent conditions for RNA-DNA hybridizations (Northern blots using a probe of e.g. 100 nt) are for example those which include at least one wash in 0.2×SSC at 63° C. for 20 min, or equivalent conditions.

[0072] “High stringency conditions” can be provided, for example, by hybridization at 65° C. in an aqueous solution containing 6×SSC (20×SSC contains 3.0 M NaCl, 0.3 M Na-citrate, pH 7.0), 5×Denhardt's (100×Denhardt's contains 2% Ficoll, 2% Polyvinyl pyrollidone, 2% Bovine Serum Albumin), 0.5% sodium dodecyl sulphate (SDS), and 20 μg/ml denaturated carrier DNA (single-stranded fish sperm DNA, with an average length of 120-3000 nucleotides) as non-specific competitor. Following hybridization, high stringency washing may be done in several steps, with a final wash (about 30 min) at the hybridization temperature in 0.2-0.1×SSC, 0.1% SDS.

[0073] “Moderate stringency conditions” refers to conditions equivalent to hybridization in the above described solution but at about 60-62° C. Moderate stringency washing may be done at the hybridization temperature in 1×SSC, 0.1% SDS.

[0074] “Low stringency” refers to conditions equivalent to hybridization in the above described solution at about 50-52° C. Low stringency washing may be done at the hybridization temperature in 2×SSC, 0.1% SDS. See also Sambrook et al. (1989) and Sambrook and Russell (2001).

### DETAILED DESCRIPTION OF THE INVENTION

[0075] The present invention is based on the identification of GSL transporter (GTR) proteins and corresponding GTR genes in the model plant Arabidopsis thaliana (Nour-Eldin, 2007, supra). It was found by the inventors that the Arabidopsis GTR genes form a small subclade with six homologs (FIG. 1a), named GTR1 to 6. The inventors further found that seeds of Arabidopsis plants knocked out in either GTR1 or GTR2 transporters had no significant reduction and about 50% reduction in total aliphatic GSLs concentrations, respectively, compared to wildtype plants, and that seeds of Arabidopsis plants knocked out in both GTR1 and GTR2 transporters had a zero GSL seed phenotype. Surprisingly, GSLs levels in senescent leaves from gtr knockout plants were high whereas, in wildtype plants, leaves become depleted in GSLs upon aging. The inventors further found that Brassica rapa (genome AA, 2n=20) and Brassica oleracea (genome CC, 2n=18) each comprise three GTR1 genes three GTR2 genes in their genome, while Brassica napus (genome AACC, 2n=4x=38), which is an allotetraploid (amphidiploid) species containing essentially two diploid genomes (the A and the C genome) due to its origin from diploid ancestors, comprises six GTR1 genes and six GTR2 genes in its genome; three of the six GTR1 and GTR2 genes are located on the A genome and three on the C genome. Brassica juncea (genome AABB, 2n=4x=36), which is another allotetraploid species containing essentially two diploid genomes (the A and the B genome) also comprises six GTR2 genes in its genome; three of the six GTR2 are located on the A genome and three on the B genome The GTR1 and GTR2 genes that are located on the A genome are herein referred to as “GTRx-Ay” (wherein x is 1 or 2 and y is 1, 2 or 3) and the GTR1 and GTR2 genes that are located on the C genome are herein referred to as “GTRx-Cy” (wherein x is 1 or 2 and y is 1, 2 or 3). The GTR1 and GTR2 genes that are located on the B genome are herein referred to as “GTRx-By” (wherein x is 1 or 2 and y is 1, 2 or 3). The GTRx-Ay genes from B. napus are said to be “homeologous” to the corresponding GTRx-Cy gene from B. napus, i.e. the “A gene” is found on the A genome and originates from the diploid ancestor B. rapa (AA), while the “C gene” is found on the C genome of B. napus and originates from the diploid ancestor B. oleracea (CC). Similarly, the GTRx-Ay genes from B. juncea are said to be “homeologous” to the corresponding GTRx-By gene from B. juncea, i.e. the “A gene” is found on the A genome and originates from the diploid ancestor B. rapa (AA), while the “B gene” is found on the B genome of B. napus and originates from the diploid ancestor B. nigra (BB)

[0076] As in any diploid genome, two “alleles” can be present in vivo for each GTR gene at each GTR locus in the genome (one allele being the gene sequence found on one chromosome and the other on the homologous chromosome). The nucleotide sequence of these two alleles may be identical (homozygous plant) or different (heterozygous plant) in any given plant, although the number of different possible alleles existing for each GTR gene may be much larger than two in the species population as a whole.

[0077] Provided herein are nucleic acid sequences of wild type and mutant GTR genes/alleles from Brassicaceae species, as well as the wild type and mutant GTR proteins. Also provided are methods of generating and combining mutant and wild type GTR alleles in Brassicaceae plants, as well as Brassicaceae plants and plant parts comprising specific combinations of wild type and mutant GTR alleles in their genome, whereby the GSL content is modified in specific parts of these plants. The use of these plants for transferring mutant GTR alleles to other plants is also an embodiment of the invention, as are the plant products of any of the plants described. In addition kits and methods for marker assisted selection (MAS) for combining or detecting GTR genes and/or alleles are provided. Different embodiments of the invention are described in detail herein below.

[0078] Nucleic Acid Sequences According to the Invention

[0079] Provided are both wild type GTR nucleic acid sequences encoding functional GTR proteins and mutant gtr nucleic acid sequences (comprising one or more mutations, preferably mutations which result in no or a significantly reduced GSL transport activity of the encoded GTR protein or in no GTR protein being produced) of GTR genes from Brassicaceae, particularly from Brassica species, especially from Brassica napus, Brassica juncea, Brassica rapa or Brassica oleracea, but also from other Brassica crop species. For example, Brassica species comprising an A and/or a C genome may comprise different alleles of GTR-A or GTR-C genes, which can be identified and combined in a single plant according to the invention. In addition, mutagenesis methods can be used to generate mutations in wild type GTR alleles, thereby generating mutant gtr alleles for use according to the invention. Because specific GTR alleles are preferably combined in a plant by crossing and selection, in one embodiment the GTR and/or gtr nucleic acid sequences are provided within a plant (i.e. endogenously), e.g. a Brassica plant, preferably a Brassica plant which can be crossed with Brassica napus, Brassica juncea, Brassica rapa or Brassica oleracea or which can be used to make a “synthetic” Brassica napus plant. Hybridization between different Brassica species is described in the art, e.g., as referred to in Snowdon (2007, Chromosome research 15: 85-95). Interspecific hybridization can, for example, be used to transfer genes from, e.g., the C genome in B. napus (AACC) to the C genome in B. carinata (BBCC), or even from, e.g., the C genome in B. napus (AACC) to the B genome in B. juncea (AABB) (by the sporadic event of illegitimate recombination between their C and B genomes). “Resynthesized” or “synthetic” Brassica napus lines can be produced by crossing the original ancestors, B. oleracea (CC) and B. rapa (AA). Interspecific, and also intergeneric, incompatibility barriers can be successfully overcome in crosses between Brassica crop species and their relatives, e.g., by embryo rescue techniques or protoplast fusion (see e.g. Snowdon, above).

[0080] However, isolated GTR and gtr nucleic acid sequences (e.g. isolated from the plant by cloning or made synthetically by DNA synthesis), as well as variants thereof and fragments of any of these are also provided herein, as these can be used to determine which sequence is present endogenously in a plant or plant part, whether the sequence encodes a functional, a non-functional or no protein (e.g. by expression in a recombinant host cell as described below) and for selection and transfer of specific alleles from one plant into another, in order to generate a plant having the desired combination of functional and mutant alleles.

[0081] “GTR nucleic acid sequences” or “GTR variant nucleic acid sequences” according to the invention are nucleic acid sequences encoding an amino acid sequence having at least 33%, at least 34%, at least 35%, at least 36%, at least 37%, at least 38%, at least 39%, at least 40%, at least 41%, at least 42%, at least 43%, at least 44%, at least 45%, at least 46%, at least 47%, at least 48%, at least 49%, at least 50%, at least 55%, at least 56%, at least 57%, at least 58%, at least 59%, at least 60%, at least 61%, at least 62%, at least 63%, at least 64%, at least 65%, at least 70%, at least 75%, at least 76%, at least 77%, at least 78%, at least 79%, at least 80%, at least 85%, at least 90%, at least 95%, 98%, 99% or 100% sequence identity with SEQ ID NO: 2, or nucleic acid sequences having at least 33%, at least 34%, at least 35%, at least 36%, at least 37%, at least 38%, at least 39%, at least 40%, at least 41%, at least 42%, at least 43%, at least 44%, at least 45%, at least 46%, at least 47%, at least 48%, at least 49%, at least 50%, at least 55%, at least 56%, at least 57%, at least 58%, at least 59%, at least 60%, at least 61%, at least 62%, at least 63%, at least 64%, at least 65%, at least 70%, at least 75%, at least 76%, at least 77%, at least 78%, at least 79%, at least 80%, at least 85%, at least 90%, at least 95%, 98%, 99% or 100% sequence identity with SEQ ID NO: 1. These nucleic acid sequences may also be referred to as being “essentially similar” or “essentially identical” to the GTR sequences provided in the sequence listing.

[0082] Nucleic acid sequences of GTR1 to 6 have been isolated from Arabidopsis, of GTRx-Ay from B. rapa, B. juncea and from B. napus, of GTRx-By from B. juncea and of GTRx-Cy from B. oleracea and from B. napus as depicted in the sequence listing. The wild type GTR sequences are depicted, while the mutant gtr sequences of these sequences, and of sequences essentially similar to these, are described herein below and in the Examples, with reference to the wild type GTR sequences. The genomic GTR protein-encoding DNA, and corresponding pre-mRNA, comprises 4 exons (numbered exons 1-4 starting from the 5′ end) interrupted by 3 introns (numbered introns 1-3, starting from the 5′ end). In the cDNA and corresponding processed mRNA (i.e. the spliced RNA), introns are removed and exons are joined, as depicted in the sequence listing. Exon sequences are more conserved evolutionarily and are therefore less variable than intron sequences.

[0083] “GTR1, 2, 3, 4, 5 or 6 nucleic acid sequences” or “GTR1, 2, 3, 4, 5 or 6 variant nucleic acid sequences” according to the invention are nucleic acid sequences encoding an amino acid sequence having at least 75%, at least 80%, at least 81%, at least 82%, at least 83%, at least 84%, at least 85%, at least 86%, at least 87%, at least 88%, at least 89%, at least 90%, at least 91%, at least 92%, at least 93%, at least 94%, at least 95%, 96%, 97%, 98%, 99% or 100% sequence identity with SEQ ID NO: 2, 4, 6, 8, 10 or 12, respectively, or nucleic acid sequences having at least 75%, at least 80%, at least 81%, at least 82%, at least 83%, at least 84%, at least 85%, at least 86%, at least 87%, at least 88%, at least 89%, at least 90%, at least 91%, at least 92%, at least 93%, at least 94%, at least 95%, 96%, 97%, 98%, 99% or 100% sequence identity with SEQ ID NO: 1, 3, 5, 7, 9 or 11. These nucleic acid sequences may also be referred to as being “essentially similar” or “essentially identical” to the GTR sequences provided in the sequence listing.

[0084] Thus the invention provides both nucleic acid sequences encoding wild type, functional GTR1, 2, 3, 4, 5 or 6 proteins, including variants and fragments thereof (as defined further below), as well as mutant nucleic acid sequences of any of these, whereby the mutation in the nucleic acid sequence preferably results in one or more amino acids being inserted, deleted or substituted in comparison to the wild type GTR protein. Preferably the mutation(s) in the nucleic acid sequence result in one or more amino acid changes (i.e. in relation to the wild type amino acid sequence one or more amino acids are inserted, deleted and/or substituted) whereby the GSL transport activity of the GTR protein is significantly reduced or completely abolished. A significant reduction in or complete abolishment of the GSL transport activity of the GTR protein refers herein to a reduction in or abolishment of the GSL transport activity of the GTR protein, such that the GSL content is modified in specific parts of a plant expressing the mutant GTR protein as compared to a plant expressing the corresponding wild type GTR protein.

[0085] To determine the functionality of specific GTR nucleic acids or proteins, they can, for example, be functionally screened in Xenopus oocytes as described by Nour-Eldin et al. (2006, Plant Methods 2: 17) and in the Examples below.

[0086] To determine the functionality of specific GTR alleles or proteins in plants, particularly in Brassicaceae plants, GSL content can, for example, be compared between specific parts of plants comprising different forms of the specific GTR alleles or proteins, for example, mutated and wildtype forms of the specific GTR alleles or proteins, e.g., by performing HPLC-UV analysis of methanol extracts desulfated and eluted from sephadex anion exchange columns as described by, e.g., Hansen et al. (2007, Plant J. 50 (5): 902-910) or as described in the Examples below.

[0087] Both endogenous and isolated nucleic acid sequences are provided herein. Also provided are fragments of the GTR sequences and GTR variant nucleic acid sequences defined above, for use as primers or probes and as components of kits according to another aspect of the invention (see further below). A “fragment” of a GTR or gtr nucleic acid sequence or variant thereof (as defined) may be of various lengths, such as at least 10, 12, 15, 18, 20, 50, 100, 200, 500, 600 contiguous nucleotides of the GTR or gtr sequence (or of the variant sequence).

[0088] Nucleic Acid Sequences Encoding Functional GTR Proteins

[0089] The nucleic acid sequences depicted in the sequence listing encode wild type, functional GTR proteins from Arabidopsis, B. rapa, B. oleracea, B. juncea and B. napus. Thus, these sequences are endogenous to the plants from which they were isolated. Other Brassicaceae plants, including Brassica crop species, varieties, breeding lines or wild accessions, may be screened for other GTR alleles, encoding the same GTR proteins or variants thereof. For example, nucleic acid hybridization techniques (e.g. Southern blot analysis, using for example stringent hybridization conditions) or PCR-based techniques may be used to identify GTR alleles endogenous to other Brassicaceae plants, such as various Brassica napus, oleracea and rapa varieties, lines or accessions, but also Brassica juncea (especially GTR alleles on the A-genome) and Brassica carinata (especially GTR alleles on the C-genome) plants, organs and tissues can be screened for other wild type GTR alleles. To screen such plants, plant organs or tissues for the presence of GTR alleles, the GTR nucleic acid sequences provided in the sequence listing, or variants or fragments of any of these, may be used. For example whole sequences or fragments may be used as probes or primers. For example specific or degenerate primers may be used to amplify nucleic acid sequences encoding GTR proteins from the genomic DNA of the plant, plant organ or tissue. These GTR nucleic acid sequences may be isolated and sequenced using standard molecular biology techniques. Bioinformatics analysis may then be used to characterize the allele(s), for example in order to determine which GTR allele the sequence corresponds to and which GTR protein or protein variant is encoded by the sequence.

[0090] Whether a nucleic acid sequence encodes a functional GTR protein can be analyzed by recombinant DNA techniques as known in the art, e.g., by a genetic complementation test using, e.g., an Arabidopsis plant, which is homozygous for one or more full knock-out gtr mutant alleles or a Brassica plant, which is homozygous for one or more full knock-out gtr mutant allele or by functionally screening the GTR protein in Xenopus oocytes as described by Nour-Eldin et al. (2006, Plant Methods 2, 17).

[0091] In addition, it is understood that GTR nucleic acid sequences and variants thereof (or fragments of any of these) may be identified in silico, by screening nucleic acid databases for essentially similar sequences. Likewise, a nucleic acid sequence may be synthesized chemically. Fragments of nucleic acid molecules according to the invention are also provided, which are described further below. Fragments include nucleic acid sequences encoding only specific conserved and functional domains as described below.

[0092] Nucleic Acid Sequences Encoding Mutant GTR Proteins

[0093] Nucleic acid sequences comprising one or more nucleotide deletions, insertions or substitutions relative to the wild type nucleic acid sequences are another embodiment of the invention, as are fragments of such mutant nucleic acid molecules. Such mutant nucleic acid sequences (referred to as gtr sequences) can be generated and/or identified using various known methods, as described further below. Again, such nucleic acid molecules are provided both in endogenous form and in isolated form. In one embodiment, the mutation(s) result in one or more changes (deletions, insertions and/or substitutions) in the amino acid sequence of the encoded GTR protein (i.e. it is not a “silent mutation”). In another embodiment, the mutation(s) in the nucleic acid sequence result in a significantly reduced or completely abolished GSL transport activity of the encoded GTR protein relative to the wild type protein.

[0094] The nucleic acid molecules may, thus, comprise one or more mutations, such as:
[0095] (a) a “missense mutation” or “substitution mutation”, which is a change in the nucleic acid sequence that results in the substitution of an amino acid for another amino acid;
[0096] (b) a “nonsense mutation” or “STOP codon mutation”, which is a change in the nucleic acid sequence that results in the introduction of a premature STOP codon and thus the termination of translation (resulting in a truncated protein); plant genes contain the translation stop codons “TGA” (UGA in RNA), “TAA” (UAA in RNA) and “TAG” (UAG in RNA); thus any nucleotide substitution, insertion, deletion which results in one of these codons to be in the mature mRNA being translated (in the reading frame) will terminate translation;
[0097] (c) an “insertion mutation” of one or more amino acids, due to one or more codons having been added in the coding sequence of the nucleic acid;
[0098] (d) a “deletion mutation” of one or more amino acids, due to one or more codons having been deleted in the coding sequence of the nucleic acid;
[0099] (e) a “frameshift mutation”, resulting in the nucleic acid sequence being translated in a different frame downstream of the mutation. A frameshift mutation can have various causes, such as the insertion, deletion or duplication of one or more nucleotides, but also mutations which affect pre-mRNA splicing (splice site mutations) can result in frameshifts;
[0100] (f) a “splice site mutation”, which alters or abolishes the correct splicing of the pre-mRNA sequence, resulting in a protein of different amino acid sequence than the wild type. For example, one or more exons may be skipped during RNA splicing, resulting in a protein lacking the amino acids by the skipped exons. Alternatively, the reading frame may be altered through incorrect splicing, or one or more introns may be retained, or alternate splice donors or acceptors may be generated, or splicing may be initiated at an alternate position (e.g. within an intron), or alternate polyadenylation signals may be generated. Correct pre-mRNA splicing is a complex process, which can be affected by various mutations in the nucleotide sequence of the GTR-encoding gene. In higher eukaryotes, such as plants, the major spliceosome splices introns containing GU at the 5′ splice site (donor site) and AG at the 3′ splice site (acceptor site). This GU-AG rule (or GT-AG rule; see Lewin, Genes VI, Oxford University Press 1998, pp 885-920, ISBN 0198577788) is followed in about 99% of splice sites of nuclear eukaryotic genes, while introns containing other dinucleotides at the 5′ and 3′ splice site, such as GC-AG and AU-AC account for only about 1% and 0.1% respectively. Examples of introns containing GU at the 5′ splice site (donor site) and AG at the 3′ splice site (acceptor site) are indicated in the sequence listing.

[0101] As already mentioned, it is desired that the mutation(s) in the nucleic acid sequence preferably result in a mutant protein comprising significantly reduced or no GSL transport activity in vivo or in the production of no protein. Any mutation which results in a protein comprising at least one amino acid insertion, deletion and/or substitution relative to the wild type protein can lead to significantly reduced or no GSL transport activity. It is, however, understood that mutations in certain parts of the protein are more likely to result in a reduced function of the mutant GTR protein, such as mutations leading to truncated proteins, whereby significant portions of conserved or functional domains are lacking.

[0102] Conserved and functional domains of the Arabidopsis GTR1, 2, 3, 4, 5 and 6 protein can be found in the Arabidopsis Information Resource (TAIR) database (http://www.arabidopsis.org) under At3g47960 for AtGTR1 (SEQ ID NO: 2), At5g62680 for AtGTR2 (SEQ ID NO: 4), At1g18880 for AtGTR3 (SEQ ID NO: 6), At1g69860 for AtGTR4 (SEQ ID NO: 8), At1g69870 for AtGTR5 (SEQ ID NO: 10) and At1g27080 for AtGTR6 (SEQ ID NO: 12) and/or by optimally aligning the Arabidopsis GTR1, 2, 3, 4, 5 and 6 protein sequences and determining conserved domains (see FIG. 1), such as amino acid sequence F/VALTKPTLGM/LAPRKGE/AISS (SEQ ID NO: 2 from the amino acid at position 448 to 466 or SEQ ID No. 142 from amino acid position 478 to 496) and sequences essentially similar thereto (such as SEQ ID NO: 4 from the amino acid at position 462 to 480 and in SEQ ID NO: 6 from the amino acid at position 436 to 454); amino acid sequence L/INxxxLDxY/FY/FxxxxxxxxxNxxY/F (SEQ ID NO: 2 from the amino acid at position 545 to 567 or SEQ ID No. 142 from position 575 to 597) and sequences essentially similar thereto.

[0103] Corresponding conserved and functional domains can be determined for the Brassica GTR proteins by optimally aligning the Brassica and Arabidopsis GTR proteins and based on the annotation information in the TAIR database.

[0104] It has been found that Arabidopsis GTR1, 2 and GTR3 contain the above mentioned sequence F/VALTKPTLGM/LAPRKGE/AISS, while Arabidopsis GTR4, 5 and GTR6 do not contain that sequence (see alignment of FIG. 7). As elaborated below in the Examples, GTR1, GTR2 and GTR3 exhibited most uptake activity of glucosinolates in the Xenopus oocytes test. The protein structure of GTR2 protein as predicted contains 12 transmembrane domains (FIG. 8). The conserved sequence forms a GTR1/2/3 specific loop near the carboxyterminus of the protein, as indicated by a dashed arrow in FIG. 8.

[0105] A similar domain can be found in GTR1 and GTR2 proteins of Brassica species including BnGTR1-A1 (SEQ ID NO: 14 amino acid positions 456-474); BnGTR1-A2 (SEQ ID NO: 16 amino acid positions 459-477); BnGTR1-A3 (SEQ ID NO: 18 amino acid positions 457-475); BnGTR1-C1 (SEQ ID NO: 20 amino acid positions 456-474); BnGTR1-C2 (SEQ ID NO: 22 amino acid positions 459-477); BnGTR1-C3 (SEQ ID NO: 24 amino acid positions 457-475); BnGTR2-A1 (SEQ ID NO: 26 amino acid positions 458-476); BnGTR2-A2 (SEQ ID NO: 28 amino acid positions 458-476); BnGTR2-A3 (SEQ ID NO: 30 amino acid positions 458-476); BnGTR2-C1 (SEQ ID NO: 32 amino acid positions 458-476); BnGTR2-C2 (SEQ ID NO: 34 amino acid positions 401-419); BnGTR2-C3 (SEQ ID NO: 36 amino acid positions 457-475); BrGTR1-A1 (SEQ ID NO: 38 amino acid positions 456-474); BrGTR1-A2 (SEQ ID NO: 40 amino acid positions 459-477); BrGTR1-A3 (SEQ ID NO: 42 amino acid positions 457-475); BrGTR2-A1 (SEQ ID NO: 44 amino acid positions 458-476); BrGTR2-A2 (SEQ ID NO: 46 amino acid positions 458-476); BrGTR2-A3 (SEQ ID NO: 48 amino acid positions 458-476); BoGTR1-C1 (SEQ ID NO: 50 amino acid positions 456-474); BoGTR1-C2 (SEQ ID NO: 52 amino acid positions 459-477); BoGTR1-C3 (SEQ ID NO: 54 amino acid positions 457-475); BoGTR2-C1 (SEQ ID NO: 56 amino acid positions 458-476); BoGTR2-C2 (SEQ ID NO: 58 amino acid positions 458-476); BoGTR2-C3 (SEQ ID NO: 60 amino acid positions 458-476); BjGTR2-A1 (SEQ ID NO: 120 amino acid positions 458-476); BjGTR2-A2 (SEQ ID NO: 122 amino acid positions 458-476); BjGTR2-A3 (SEQ ID NO: 124 amino acid positions 458-476); BjGTR2-B1 (SEQ ID NO: 126 amino acid positions 405-423); BjGTR2-B2 (SEQ ID NO: 128 amino acid positions 458-476) and BjGTR2-B3 (SEQ ID NO: 130 amino acid positions 452-470).

[0106] It has also been recently found, and confirmed by proteomic data, that the GTR1 protein of Arabidopsis thaliana may comprise an aminoterminal peptide extension with a length of 30 amino acids when compared with the GTR1 protein as represented in SEQ ID No 2. The variant with the N-terminal extension is provided in SEQ ID No. 142 and the nucleotide sequence encoding such a protein is provided in SEQ ID No. 141. A similar N-terminal peptide could be found in B. rapa GTR1_A1, GTR1_A2, GTR1_A3, B. napus GTR1_A1, GTR1_A2, GTR1_A3, in B. oleracea GTR_C1, GT1_C2, GTR1_C3 and in B. napus GTR_C1, GT1_C2, GTR1_C3 (SEQ ID NOS: 143-150). It can be expected that a similar extension can be found in the GTR1_B1, GTR1_B2 and GTR1_B3 such as present in B. juncea. Mutations altering this 30/23 amino acid sequence may result in mutant GTR1 protein being located at a different subcellular location in the plant cell, and thus in functionally less or not active GTR1 protein. The amino terminal peptide may also interact with proteins providing a regulatory mechanism impacting the GTR1 activity under certain conditions such as e.g. different kinds of stresses, and mutants in this region may impact functionality also in this manner.

[0107] Thus in one embodiment, nucleic acid sequences comprising one or more of any of the types of mutations described above are provided. In another embodiment, gtr sequences comprising one or more stop codon (nonsense) mutations, one or more substitution (missense) mutations and/or one or more splice site (frameshift) mutations are provided. Any of the above mutant nucleic acid sequences are provided per se (in isolated form), as are plants and plant parts comprising such sequences endogenously. In the tables herein below the most preferred gtr alleles are described.

[0108] A nonsense mutation in a GTR allele, as used herein, is a mutation in a GTR allele whereby one or more translation stop codons are introduced into the coding DNA and the corresponding mRNA sequence of the corresponding wild type GTR allele. Translation stop codons are TGA (UGA in the mRNA), TAA (UAA) and TAG (UAG). Thus, any mutation (deletion, insertion or substitution) that leads to the generation of an in-frame stop codon in the coding sequence will result in termination of translation and truncation of the amino acid chain. In one embodiment, a mutant GTR allele comprising a nonsense mutation is a GTR allele wherein an in-frame stop codon is introduced in the GTR codon sequence by a single nucleotide substitution, such as the mutation of CAG to TAG, TGG to TAG or TGA, CGA to TGA, CAA to TAA, etc. (see Tables below). In one aspect, a mutant GTR allele comprising a nonsense mutation is a GTR allele comprising a STOP codon at a position corresponding to the codon of the amino acid at position 229 in SEQ ID NO: 66, such as the GTR allele indicated in Table 7 of Example 3 below. In another embodiment, a mutant GTR allele comprising a nonsense mutation is a GTR allele wherein an in-frame stop codon is introduced in the GTR codon sequence by double nucleotide substitutions, such as the mutation of CAG to TAA, TGG to TAA, CGA to TAA, etc. (see Tables below). In yet another embodiment, a mutant GTR allele comprising a nonsense mutation is a GTR allele wherein an in-frame stop codon is introduced in the GTR codon sequence by triple nucleotide substitutions, such as the mutation of CGG to TAA, etc. (see Tables below). The truncated protein lacks the amino acids encoded by the coding DNA downstream of the mutation (i.e. the C-terminal part of the GTR protein) and maintains the amino acids encoded by the coding DNA upstream of the mutation (i.e. the N-terminal part of the GTR protein). The more truncated the mutant GTR protein is in comparison to the wild type GTR protein, the more the truncation may result in a significantly reduced or no activity of the GTR protein.

[0109] The Tables herein below describe a range of possible nonsense mutations in Arabidopsis and Brassica GTR sequences provided herein:

TABLE 1
Potential EMS-indiced STOP codon mutations in exon
(abbreviated as E) 1, 2, 3 and 4 of AtGTR1 and AtGTR2

| | AtGTR1 | | | | AtGTR2 | | | |
|---|---|---|---|---|---|---|---|---|
| | | Amino | | | | Amino | | |
| | | acid | | | | acid | | |
| | Nucleotide | position | | | Nucleotide | position | | |
| | position in | in SEQ | | | position in | in SEQ | | |
| | SEQ ID NO: | ID NO: | Wildtype | → Potential | SEQ ID | ID NO: | Wildtype | → Potential |
| | 61 | 62 | codon | stop codons | NO: 63 | 64 | codon | stop codons |
| E1 | 79-81 | 27 | CAG | TAG TAA | 43-45 | 15 | CAG | TAA TAG |
| | 103-105 | 35 | TGG | TAG TAA TGA | 109-111 | 37 | CAG | TAA TAG |
| | | | | | 115-117 | 39 | CAG | TAA TAG |
| | | | | | 139-141 | 47 | TGG | TAA TAG TGA |
| E2 | | | | | 708-710 | 114 | CGA | TGA TAA |
| E3 | 1085-1087 | 147 | CAG | TAG TAA | 877-879 | 140 | CAA | TAA |
| | 1172-1174 | 176 | CAG | TAG TAA | 940-942 | 161 | CAG | TAG TAA |
| | 1226-1228 | 194 | TGG | TGA TAG TAA | 1027-1029 | 190 | CAG | TAA TAG |
| | 1253-1255 | 203 | CAG | TAA TAG | 1081-1083 | 208 | TGG | TGA TAG TAA |
| | 1286-1288 | 214 | CAG | TAG TAA | 1108-1110 | 217 | CAG | TAG TAA |
| | 1301-1303 | 219 | TGG | TAG TAA TGA | 1141-1143 | 228 | CAG | TAG TAA |
| | 1448-1450 | 268 | CGA | TAA TGA | 1156-1158 | 233 | TGG | TAG TGA TAA |
| | 1469-1471 | 275 | CAG | TAA TAG | 1276-1278 | 273 | CAA | TAA |
| | 1475-1477 | 277 | TGG | TAG TGA TAA | 1324-1326 | 289 | CAG | TAA TAG |
| | 1538-1540 | 298 | CAG | TAG TAA | 1330-1332 | 291 | TGG | TAA TGA TAG |
| | | | | | 1393-1395 | 312 | CAA | TAA |
| E4 | 1705-1707 | 324 | TGG | TGA TAG TAA | 1527-1529 | 329 | CAG | TAA TAG |
| | 1723-1725 | 330 | CAG | TAA TAG | 1554-1556 | 338 | TGG | TGA TAG TAA |
| | 1726-1728 | 331 | CAA | TAA | 1572-1574 | 344 | CAA | TAA |
| | 1768-1770 | 345 | TGG | TAG TGA TAA | 1575-1577 | 345 | CAA | TAA |
| | 1807-1809 | 358 | CAA | TAA | 1617-1619 | 359 | TGG | TGA TAA TAG |
| | 1828-1830 | 365 | CAA | TAA | 1653-1655 | 371 | CAA | TAA |
| | 1837-1839 | 368 | CAG | TAG TAA | 1656-1658 | 372 | CAA | TAA |
| | 1846-1848 | 371 | CGA | TAA TGA | 1677-1679 | 379 | CAA | TAA |
| | 1849-1851 | 372 | CGA | TGA TAA | 1686-1688 | 382 | CAG | TAG TAA |
| | 1999-2001 | 422 | CAA | TAA | 1848-1850 | 436 | CAG | TAA TAG |
| | 2113-2115 | 460 | CGG | TGA TAA TAG | 1914-1916 | 458 | CGA | TGA TAA |
| | 2146-2148 | 471 | TGG | TAA TGA TAG | 1995-1997 | 485 | TGG | TGA TAG TAA |
| | 2158-2160 | 475 | CAG | TAG TAA | 2007-2009 | 489 | CAG | TAA TAG |
| | 2203-2205 | 490 | CAA | TAA | 2052-2054 | 504 | CAA | TAA |
| | 2224-2226 | 497 | CAG | TAA TAG | 2073-2075 | 511 | CAG | TAG TAA |
| | 2323-2325 | 530 | CGA | TGA TAA | 2181-2183 | 547 | CAG | TAA TAG |
| | 2353-2355 | 540 | TGG | TAA TAG TGA | 2202-2204 | 554 | TGG | TGA TAA TAG |
| | 2455-2457 | 574 | TGG | TAA TAG TGA | 2304-2306 | 588 | TGG | TAA TGA TAG |
| | 2524-2526 | 597 | CAA | TAA | 2370-2372 | 610 | CAG | TAA TAG |
| | 2527-2529 | 598 | CAG | TAG TAA | 2373-2375 | 611 | CAA | TAA |
| | 2530-2532 | 599 | CAG | TAA TAG | | | | |
| | 2536-2538 | 601 | CAA | TAA | | | | |

For AtGTR1 the numbers may be increased with 90 nt or 30 AA to make reference to the position taking into account the N-terminal extension of 30 AA.

TABLE 2a
Potential EMS-induced STOP codon mutations in exon
(abbreviated as E) 1, 2, 3 and 4 o BnGTR1-A1 and C1

| | BnGTR1-A1 | | | BnGTR1-C1 | | |
|---|---|---|---|---|---|---|
| | Nucleotide | | | Nucleotide | | |
| | position in | | | position in | | |
| | SEQ ID NO: | Wildtype | → Potential | SEQ ID NO: | Wildtype | → Potential |
| | 13* | codon | stop codons | 19* | codon | stop codons |
| E1 | 103-105 | CAG | TAG TAA | 103-105 | CAG | TAA TAG |
| | 127-129 | TGG | TAA TAG TGA | 127-129 | TGG | TAG TAA TGA |
| E3 | 991-993 | CAG | TAA TAG | 992-994 | CAG | TAG TAA |
| | 1003-1005 | CAA | TAA | 1004-1006 | CAA | TAA |
| | 1021-1023 | CAG | TAA TAG | 1022-1024 | CAG | TAG TAA |
| | 1108-1110 | CAG | TAA TAG | 1109-1111 | CAG | TAA TAG |
| | 1162-1164 | TGG | TAA TAG TGA | 1163-1165 | TGG | TGA TAG TAA |
| | 1189-1191 | CAG | TAA TAG | 1190-1192 | CAG | TAG TAA |
| | 1222-1224 | CAG | TAA TAG | 1223-1225 | CAG | TAA TAG |
| | 1237-1239 | TGG | TGA TAA TAG | 1238-1240 | TGG | TAG TGA TAA |
| | 1405-1407 | CAG | TAG TAA | 1406-1408 | CAG | TAG TAA |
| | 1411-1413 | TGG | TAA TGA TAG | 1412-1414 | TGG | TGA TAG TAA |
| | 1474-1476 | CAG | TAG TAA | 1475-1477 | CAG | TAA TAG |
| E4 | 1632-1634 | TGG | TAA TAG TGA | 1633-1635 | TGG | TAA TGA TAG |
| | 1650-1652 | CAG | TAA TAG | 1651-1653 | CAG | TAA TAG |
| | 1695-1697 | TGG | TAA TGA TAG | 1696-1698 | TGG | TAA TAG TGA |
| | 1734-1736 | CAA | TAA | 1735-1737 | CAA | TAA |
| | 1755-1757 | CAA | TAA | 1756-1758 | CAA | TAA |
| | 1764-1766 | CAG | TAA TAG | 1765-1767 | CAG | TAA TAG |
| | 1776-1778 | CGA | TGA TAA | 1777-1779 | CTA | |
| | 1926-1928 | CAA | TAA | 1927-1929 | CAA | TAA |
| | 2016-2018 | CGA | TAA TGA | 2017-2019 | CGA | TAA TGA |
| | 2040-2042 | CGA | TAA TGA | 2041-2043 | CGA | TGA TAA |
| | 2073-2075 | TGG | TGA TAA TAG | 2074-2076 | TGG | TAG TAA TGA |
| | 2085-2087 | CAG | TAA TAG | 2086-2088 | CAG | TAG TAA |
| | 2130-2132 | CAA | TAA | 2131-2133 | CAA | TAA |
| | 2151-2153 | CAG | TAA TAG | 2152-2154 | CAG | TAA TAG |
| | 2280-2282 | TGG | TAG TAA TGA | 2281-2283 | TGG | TAG TAA TGA |
| | 2382-2384 | TGG | TAG TAA TGA | 2383-2385 | TGG | TAA TAG TGA |
| | 2451-2453 | CAA | TAA | 2452-2454 | CAA | TAA |
| | 2454-2456 | CAA | TAA | 2455-2457 | CAA | TAA |

*The corresponding amino acid position in SEQ ID NO: 14 and 20 corresponds to the number of the amino acid encoded by the amino acid codon at the indicated nucleotide positions in SEQ ID NO: 13 and 19, respectively, in the sequence listing.

For BnGTR1-C1 of SEQ ID No. 137 stopcodons can be induced by EMS mutagenesis at each of the following position: 103-105, 127-129, 1227-1229, 1239-1241, 1257-1259, 1344-1346, 1398-1400, 1425-1427, 1458-1460, 1473-1475, 1641-1643, 1647-1649, 1710-1712, 1868-1870, 1886-1888, 1931-1933, 1970-1972, 1991-1993, 2000-2002, 2162-2164, 2252-2254, 2276-2278, 2309-2311, 2321-2323, 2366-2368, 2387-2389, 2516-2518, 2618-2620, 2687-2689, 2690-2692

TABLE 2b
Potential EMS-induced STOP codon mutations in exon
(abbreviated as E) 1, 2, 3 and 4 of BnGTR1-A2 and C2

| | BnGTR1-A2 | | | BnGTR1-C2 | | |
|---|---|---|---|---|---|---|
| | Nucleotide | | | Nucleotide | | |
| | position in | | | position in | | |
| | SEQ ID NO: | Wildtype | → Potential | SEQ ID NO: | Wildtype | → Potential |
| X | 15 | codon | stop codons | 21 | codon | stop codons |
| E1 | 49-51 | CAG | TAG TAA | 49-51 | CAG | TAA TAG |
| | 112-114 | CAG | TAG TAA | 112-114 | CAG | TAA TAG |
| | 136-138 | TGG | TGA TAA TAG | 136-138 | TGG | TAA TGA TAG |
| E2 | 730-732 | CAA | TAA | 703-705 | CAA | TAA |
| E3 | 1068-1070 | CAG | TAG TAA | 1048-1050 | CAG | TAA TAG |
| | 1155-1157 | CAG | TAG TAA | 1135-1137 | CAG | TAG TAA |
| | 1209-111 | TGG | TAA TAG TGA | 1189-1191 | TGG | TGA TAA TAG |
| | 1236-1238 | CAG | TAG TAA | 1216-1218 | CAG | TAA TAG |
| | 1269-1271 | CAG | TAG TAA | 1249-1251 | CAG | TAG TAA |
| | 1284-1286 | TGG | TAG TGA TAA | 1264-1266 | TGG | TGA TAG TAA |
| | 1431-1433 | CGA | TGA TAA | 1411-1413 | CGA | TAA TGA |
| | 1452-1454 | CAG | TGA TAA | 1432-1434 | CAG | TAG TAA |
| | 1458-1460 | TGG | TGA TAA TAG | 1438-1440 | TGG | TGA TAA TAG |
| | 1521-1523 | CAG | TAA TAG | 1501-1503 | CAG | TAG TAA |
| E4 | 1823-1825 | TGG | TAA TAG TGA | 1778-1780 | TGG | TAA TAG TGA |
| | 1841-1843 | CAG | TAG TAA | 1796-1798 | CAG | TAG TAA |
| | 1844-1846 | CAA | TAA | 1799-1801 | CAA | TAA |
| | 1886-1888 | TGG | TAA TAG TGA | 1841-1843 | TGG | TGA TAA TAG |
| | 1925-1927 | CAA | TAA | 1880-1882 | CAA | TAA |
| | 1946-1948 | CAA | TAA | 1901-1903 | CAA | TAA |
| | 1952-1954 | CAA | TAA | 1907-1909 | CAA | TAA |
| | 1955-1957 | CAG | TAA TAG | 1910-1912 | CAG | TAA TAG |
| | 2117-2119 | CAA | TAA | 2072-2074 | CAA | TAA |
| | 2210-2212 | CAG | TAA TAG | 2165-2167 | CAG | TAG TAA |
| | 2231-2233 | CGA | TGA TAA | 2186-2188 | CGA | TGA TAA |
| | 2264-2266 | TGG | TAA TGA TAG | 2219-2221 | TGG | TAG TGA TAA |
| | 2276-2278 | CAG | TAA TAG | 2231-2233 | CAG | TAA TAG |
| | 2321-2323 | CAG | TAA TAG | 2276-2278 | CAG | TAA TAG |
| | 2342-2344 | CAG | TAA TAG | 2297-2299 | CAG | TAG TAA |
| | 2441-2443 | CGG | TAA TGA TAG | 2396-2398 | AGG | |
| | 2471-2473 | TGG | TGA TAG TAA | 2426-2428 | TGG | TAA TGA TAG |
| | 2642-2644 | CAG | TAA TAG | 2597-2599 | CAG | TAG TAA |
| | 2648-2650 | CAA | TAA | 2603-2605 | CAA | TAA |

*The corresponding amino acid position in SEQ ID NO: 16 and 22 corresponds to the number of the amino acid encoded by the amino acid codon at the indicated nucleotide positions in SEQ ID NO: 15 and 21, respectively, in the sequence listing.

TABLE 2c
Potential EMS-induced STOP codon mutations in exon
(abbreviated as E) 1, 2, 3 and 4 of BnGTR1-A3 and C3

| | BnGTR1-A3 | | | BnGTR1-C3 | | |
|---|---|---|---|---|---|---|
| | Nucleotide | | | Nucleotide | | |
| | position in | | | position in | | |
| | SEQ ID NO: | Wildtype | Potential | SEQ ID NO: | Wildtype | Potential |
| | 17 | codon | stop codons | 23 | codon | stop codons |
| E1 | 106-108 | CAG | TAA TAG | 106-108 | CAG | TAA TAG |
| | 130-132 | TGG | TAA TGA TAG | 130-132 | TGG | TGA TAG TAA |
| E2 | 579-581 | CAA | TAA | 581-583 | CAA | TAA |
| E3 | 886-888 | CAA | TAA | 887-889 | CAA | TAA |
| | 904-906 | CAG | TAG TAA | 905-907 | CAG | TAG TAA |
| | 991-993 | CAG | TAG TAA | 992-994 | CAG | TAG TAA |
| | 1045-1047 | TGG | TGA TAG TAA | 1046-1048 | TGG | TAA TGA TAG |
| | 1072-1074 | CAG | TAG TAA | 1073-1075 | CAG | TAG TAA |
| | 1105-1107 | CAG | TAA TAG | 1106-1108 | CAG | TAG TAA |
| | 1120-1122 | TGG | TAG TAA TGA | 1121-1123 | TGG | TGA TAA TAG |
| | 1267-1269 | CGA | TAA TGA | 1268-1270 | CGA | TGA TAA |
| | 1357-1359 | CAG | TAA TAG | 1358-1360 | CAG | TAG TAA |
| E4 | 1503-1505 | TGG | TAA TAG TGA | 1512-1514 | TGG | TAA TAG TGA |
| | 1521-1523 | CAG | TAA TAG | 1530-1532 | CAG | TAA TAG |
| | 1524-1526 | CAG | TAA TAG | 1533-1535 | CAG | TAA TAG |
| | 1566-1568 | TGG | TAG TGA TAA | 1575-1577 | TGG | TAA TGA TAG |
| | 1605-1607 | CAA | TAA | 1614-1616 | CAA | TAA |
| | 1626-1628 | CAA | TAA | 1635-1637 | CAA | TAA |
| | 1635-1637 | CAG | TAA TAG | 1644-1646 | CAG | TAA TAG |
| | 1644-1646 | CGG | TGA TAA TAG | 1653-1655 | CGG | TAA TGA TAG |
| | 1797-1799 | CAA | TAA | 1806-1808 | CAA | TAA |
| | 1863-1865 | CGG | TAG TGA TAA | 1872-1874 | CGG | TAA TGA TAG |
| | 1866-1868 | CGA | TGA TAA | 1875-1877 | CGA | TGA TAA |
| | 1911-1913 | CGA | TGA TAA | 1920-1922 | CGA | TAA TGA |
| | 1944-1946 | TGG | TAG TAA TGA | 1953-1955 | TGG | TAG TGA TAA |
| | 1956-1958 | CAG | TAA TAG | 1965-1967 | CAG | TAG TAA |
| | 2001-2003 | CAA | TAA | 2010-2012 | CAA | TAA |
| | 2022-2024 | CAG | TAG TAA | 2031-2033 | CAG | TAA TAG |
| | 2151-2153 | TGG | TGA TAA TAG | 2160-2162 | TGG | TAA TAG TGA |
| | 2328-2330 | CAG | TAG TAA | 2337-2339 | CAG | TAA TAG |
| | 2331-2333 | CAA | TAA | 2340-2342 | CAA | TAA |

*The corresponding amino acid position in SEQ ID NO: 18 and 24 corresponds to the number of the amino acid encoded by the amino acid codon at the indicated nucleotide positions in SEQ ID NO: 17 and 23, respectively, in the sequence listing.

TABLE 3a
Potential EMS-induced STOP codon mutations in exon
(abbreviated as E) 1, 2, 3 and 4 of BnGTR2-A1 and C1

| | BnGTR2-A1 | | | BnGTR2-C1 | | |
|---|---|---|---|---|---|---|
| | Nucleotide | | | Nucleotide | | |
| | position in | | | position in | | |
| | SEQ ID NO: | Wildtype | → Potential | SEQ ID NO: | Wildtype | → Potential |
| | 25 | codon | stop codons | 31 | codon | stop codons |
| E1 | 40-42 | CAA | TAA | 40-42 | CAA | TAA |
| | 133-135 | TGG | TGA TAA TAG | 133-135 | TGG | TGA TAA TAG |
| E2 | 675-677 | CGA | TGA TAA | 702-704 | CGA | TAA TAG |
| E3 | 848-850 | CAA | TAA | 872-874 | CAA | TAA |
| | 905-907 | CAG | TAA TAG | 929-931^{b} | CAG | TAG TAA |
| | 992-994 | CAG | TAA TAG | 1016-1018 | CAG | TAA TAG |
| | 1022-1024 | CGA | TAA TGA | 1046-1048 | CGA | TAA TGA |
| | 1046-1048 | TGG | TGA TAG TAA | 1070-1072 | TGG | TGA TAA TAG |
| | 1073-1075 | CAG | TAA TAG | 1097-1099 | CAG | TAG TAA |
| | 1106-1108 | CAG | TAA TAG | 1130-1132 | CAG | TAG TAA |
| | 1121-1123 | TGG | TAA TGA TAG | 1145-1147^{c} | TGG | TAG TGA TAA |
| | 1241-1243^{a} | CAA | TAA | 1265-1267 | CAA | TAA |
| | 1295-1297 | TGG | TGA TAA TAG | 1319-1321 | TGG | TAG TAA TGA |
| | 1358-1360 | CAG | TAA TAG | 1382-1384 | CAG | TAG TAA |
| E4 | 1535-1537 | TGG | TAG TAA TGA | 1554-1556 | TGG | TAA TGA TAG |
| | 1553-1555 | CAA | TAA | 1572-1574 | CAA | TAA |
| | 1556-1558 | CAA | TAA | 1575-1577 | CAA | TAA |
| | 1598-1600 | TGG | TAA TGA TAG | 1617-1619 | TGG | TAA TGA TAG |
| | 1634-1636 | CAA | TAA | 1653-1655 | CAA | TAA |
| | 1637-1639 | CAA | TAA | 1656-1658 | CAA | TAA |
| | 1659-1660 | CAA | TAA | 1677-1679 | CAA | TAA |
| | 1667-1669 | CAG | TAG TAA | 1686-1688 | CAG | TAA TAG |
| | 1829-1831 | CAG | TAA TAG | 1848-1850 | CAG | TAG TAA |
| | 1895-1897 | CGG | TAG TAA TGA | 1914-1916 | CGG | TAA TGA TAG |
| | 1976-1978 | TGG | TGA TAA TAG | 1995-1997 | TGG | TAG TGA TAA |
| | 1988-1990 | CAA | TAA | 2007-2009 | CAA | TAA |
| | 2033-2035 | CAG | TAA TAG | 2052-2054 | CAG | TAG TAA |
| | 2054-2056 | CAG | TAA TAG | 2073-2075 | CAA | TAA |
| | 2162-2164 | CAG | TAA TAG | 2181-2183 | CAG | TAA TAG |
| | 2183-2185 | TGG | TGA TAA TAG | 2202-2204 | TGG | TAA TGA TAG |
| | 2285-2287 | TGG | TGA TAA TAG | 2304-2306 | TGG | TAA TGA TAG |
| | 2351-2353 | CAA | TAA | 2370-2372 | CAA | TAA |
| | 2354-2356 | CAA | TAA | 2373-2375 | CAA | TAA |

*The corresponding amino acid position in SEQ ID NO: 26 and 32 corresponds to the number of the amino acid encoded by the amino acid codon at the indicated nucleotide positions in SEQ ID NO: 25 and 31, respectively, in the sequence listing.
^{a}BnGTR2-A1-ems02 allele of the examples
^{b}BnGTR2-C1-ems01 allele of the examples
^{c}BnGTR2-C1-ems05 allele of the examples

TABLE 3b
Potential EMS-induced STOP codon mutations in exon
abbreviated as E) 1, 2, 3 and 4 of BnGTR2-A2 and C2

| | BnGTR2-A2 | | | BnGTR2-C2 | | |
|---|---|---|---|---|---|---|
| | Nucleotide | | | Nucleotide | | |
| | position in | | | position in | | |
| | SEQ ID NO: | Wildtype | → Potential | SEQ ID NO: | Wildtype | → Potential |
| x | 27 | codon | stop codons | 33 | codon | stop codons |
| E1 | 40-42 | CAG | TAA TAG | | | |
| | 106-108 | CAG | TAA TAG | | | |
| | 133-135 | TGG | TGA TAG TAA | | | |
| E3 | 870-872^{d} | CAA | TAA | 333-335 | CAA | TAA |
| | 927-929 | CAG | TAA TAG | 390-392 | CAG | TAG TAA |
| | 1014-1016 | CAG | TGA TAA | 477-479 | CAG | TAG TAA |
| | 1068-1070 | TGG | TGA TAA TAG | 531-533 | TGG | TAG TAA TGA |
| | 1095-1097 | CAG | TAG TAA | 558-560 | CAG | TAA TAG |
| | 1128-1130 | CAG | TAG TAA | 591-593 | CAG | TAA TAG |
| | 1143-1145 | TGG | TGA TAA TAG | 606-608 | TGG | TAA TGA TAG |
| | 1263-1265 | CAA | TAA | 726-728 | CAA | TAA |
| | 1311-1313 | CAG | TAA TAG | 774-776 | CAG | TAA TAG |
| | 1317-1319 | TGG | TAA TGA TAG | 780-782^{f} | TGG | TGA TAA TAG |
| | 1380-1382^{e} | CAG | TAG TAA | 843-845 | CAG | TAG TAA |
| E4 | 1532-1534 | TGG | TAG TGA TAA | 994-996 | TGG | TGA TAA TAG |
| | 1550-1552 | CAA | TAA | 1012-1014 | CAA | TAA |
| | 1553-1555 | CAA | TAA | 1015-1017 | CAA | TAA |
| | 1595-1597 | TGG | TGA TAA TAG | 1057-1059 | TGG | TAA TGA TAG |
| | 1631-1633 | CAA | TAA | 1093-1095 | CAA | TAA |
| | 1634-1636 | CAA | TAA | 1096-1098 | CAA | TAA |
| | 1655-1657 | CAA | TAA | 1117-1119 | CAA | TAA |
| | 1664-1666 | CAG | TAA TAG | 1126-1128 | CAG | TAG TAA |
| | 1826-1828 | CAA | TAA | 1288-1290 | CAA | TAA |
| | 1892-1894 | CGG | TAA TAG TGA | 1354-1356 | CGG | TGA TAA TAG |
| | 1940-1942 | CGG | TAG TGA TAA | 1402-1404 | CGG | TGA TAG TAA |
| | 1973-1975 | TGG | TGA TAG TAA | 1435-1437 | TGG | TAG TAA TGA |
| | 1985-1987 | CAG | TAG TAA | 1447-1449 | CAG | TAA TAG |
| | 2030-2032 | CAG | TAG TAA | 1492-1494 | CAG | TAA TAG |
| | 2051-2053 | CAG | TAA TAG | 1513-1515 | CAG | TAG TAA |
| | 2159-2161 | CAG | TAG TAA | 1621-1623 | CAG | TAG TAA |
| | 2180-2182 | TGG | TAG TAA TGA | 1642-1644 | TGG | TGA TAA TAG |
| | 2282-2284 | TGG | TGA TAA TAG | 1744-1746 | TGG | TAA TAG TGA |
| | 2348-2350 | CAA | TAA | 1810-1812 | CAA | TAA |
| | 2351-2353 | CAA | TAA | 1813-1815 | CAA | TAA |

*The corresponding amino acid position in SEQ ID NO: 28 and 34 corresponds to the number of the amino acid encoded by the amino acid codon at the indicated nucleotide positions in SEQ ID NO: 27 and 33, respectively, in the sequence listing.
^{a}BnGTR2-A2-ems03 allele of the examples
^{b}BnGTR2-A2-ems09 allele of the examples
^{c}BnGTR2-C2-ems02 allele of the examples

TABLE 3c
Potential EMS-induced STOP codon mutations in exon
(abbreviated as E) 1, 2, 3 and 4 of BnGTR2-A3 and C3

| | BnGTR2-A3 | | | BnGTR2-C3 | | |
|---|---|---|---|---|---|---|
| | Nucleotide | | | Nucleotide | | |
| | position in | | | position in | | |
| | SEQ ID NO: | Wildtype | → Potential | SEQ ID NO: | Wildtype | → Potential |
| | 29 | codon | stop codons | 35 | codon | stop codons |
| E1 | 40-42 | CAA | TAA | 40-42 | CAA | TAA |
| | 133-135 | TGG | TAG TAA TGA | 130-132 | TGG | TGA TAA TAG |
| E2 | 512-514 | CGA | TGA TAA | 508-510 | CGA | TAA TGA |
| E3 | 682-684 | CAG | TAA TAG | 674-676 | CAA | TAA |
| | 739-741 | CAG | TAG TAA | 731-733 | CAG | TAA TAG |
| | 826-828 | CAG | TAA TAG | 818-820 | CAG | TAA TAG |
| | 880-882 | TGG | TAG TGA TAA | 872-874 | TGG | TAG TAA TGA |
| | 907-909 | CAG | TAG TAA | 899-901 | CAG | TAG TAA |
| | 940-942 | CAG | TAA TAG | 932-934 | CAG | TAA TAG |
| | 955-957 | TGG | TAG TAA TGA | 947-949 | TGG | TAA TAG TGA |
| | 1123-1125 | CAG | TAG TAA | 1115-1117 | CAG | TAG TAA |
| | 1129-1131 | TGG | TGA TAA TAG | 1121-1123 | TGG | TAG TAA TGA |
| | 1189-1191 | CAA | TAA | | | |
| | 1192-1194 | CAA | TAA | 1184-1186 | CAA | TAA |
| E4 | 1464-1466 | TGG | TAA TAG TGA | 1528-1530 | TGG | TAA TAG TGA |
| | 1482-1484 | CAA | TAA | 1546-1548 | CAA | TAA |
| | 1485-1487 | CAA | TAA | 1549-1551 | CAG | TAG TAA |
| | 1527-1529 | TGG | TAA TGA TAG | 1591-1593 | TGG | TGA TAG TAA |
| | 1563-1565 | CAA | TAA | 1627-1629 | CAA | TAA |
| | 1566-1568 | CAA | TAA | 1630-1632 | CAA | TAA |
| | 1587-1589 | CAA | TAA | 1651-1653 | CAA | TAA |
| | 1596-1598 | CAG | TAG TAA | 1660-1662 | CAG | TAG TAA |
| | 1758-1760 | CAA | TAA | 1822-1824 | CAA | TAA |
| | 1848-1850 | CAA | TAA | | | |
| | 1872-1874 | CGG | TAA TAG TGA | 1936-1938 | CGG | TAA TAG TGA |
| | 1905-1907 | TGG | TAA TAG TGA | 1969-1971 | TGG | TAG TAA TGA |
| | 1917-1919 | CAG | TAG TAA | 1981-1983 | CAG | TAA TAG |
| | 1962-1964 | CAG | TAG TAA | 2026-2028 | CAG | TAA TAG |
| | 1983-1985 | CAG | TAA TAG | 2047-2049 | CAG | TAG TAA |
| | 2091-2093 | CAG | TAA TAG | 2155-2157 | CAG | TAG TAA |
| | 2112-2114 | TGG | TAA TAG TGA | 2176-2178 | TGG | TAA TAG TGA |
| | 2214-2216 | TGG | TAG TGA TAA | 2278-2280 | TGG | TAG TGA TAA |
| | 2283-2285 | CAA | TAA | 2347-2349 | CAA | TAA |

*The corresponding amino acid position in SEQ ID NO: 30 and 36 corresponds to the number of the amino acid encoded by the amino acid codon at the indicated nucleotide positions in SEQ ID NO: 29 and 35, respectively, in the sequence listing.

TABLE 3d
Potential EMS-induced STOP codon mutations in exon 1, 2, 3
and 4 of BjGTR2-A1 and B1

| | BjGTR2-A1 | | | BnGTR2-B1 | | |
|---|---|---|---|---|---|---|
| | Nucleotide | | | Nucleotide | | |
| | position in | | | position in | | |
| | SEQ ID NO: | Wildtype | → Potential | SEQ ID NO: | Wildtype | → Potential |
| | 119 | codon | stop codons | 125 | codon | stop codons |
| E1 | 662-664 | CAA | TAA | | | |
| | 755-757 | TGG | TAA TGA TAG | | | |
| E2 | 1294-1296 | CGA | TAA TGA | 177-179 | CGA | TGA TAA |
| E3 | 1523-1525 | CAG | TAG TAA | 353-355 | CAG | TAG TAA |
| | 1610-1612 | CAG | TAG TAA | 410-412 | CAG | TAG TAA |
| | 1640-1642 | CGA | TAA TGA | 497-499 | CAG | TAA TAG |
| | 1664-1666 | TGG | TAG TAA TGA | 551-553 | TGG | TAA TAG TGA |
| | 1691-1693 | CAG | TAA TAG | 578-580 | CAG | TAG TAA |
| | 1724-1726 | CAG | TAA TAG | 611-613 | CAG | TAA TAG |
| | 1739-1741 | TGG | TGA TAG TAA | 626-628 | TGG | TAA TAG TGA |
| | 1859-1861 | CAA | TAA | 746-748 | CAA | TAA |
| | 1913-1915 | TGG | TAA TAG TGA | 794-796 | CAG | TAG TAA |
| | 1976-1978 | CAG | TAA TAG | 800-802 | TGG | TAA TAG TGA |
| E4 | | | | 863-865 | CAG | TAA TAG |
| | 2153-2155 | TGG | TAG TAA TGA | 1036-1038 | TGG | TGA TAG TAA |
| | 2171-2173 | CAA | TAA | 1054-1056 | CAA | TAA |
| | | | | 1057-1059 | CAA | TAA |
| | 2174-2176 | CAA | TAA | 1099-1101 | TGG | TAA TGA TAG |
| | 2216-2218 | TGG | TGA TAG TAA | 1135-1137 | CAA | TAA |
| | 2252-2254 | CAA | TAA | 1138-1140 | CAG | TAA TAG |
| | 2255-2257 | CAA | TAA | 1159-1161 | CAA | TAA |
| | 2276-2278 | CAA | TAA | 1168-1170 | CAG | TAG TAA |
| | 2285-2287 | CAG | TAA TAG | 1330-1332 | CAG | TAA TAG |
| | 2447-2449 | CAG | TAA TAG | 1477-1479 | TGG | TGA TAA TAG |
| | 2513-2515 | CGG | TGA TAG TAA | 1489-1491 | CAA | TAA |
| | 2594-2596 | TGG | TAA TAG TGA | 1534-1536 | CAG | TAG TAA |
| | 2606-2608 | CAA | TAA | 1555-1557 | CAA | TAA |
| | 2651-2653 | CAG | TAG TAA | 1663-1665 | CAG | TAA TAG |
| | 2672-2674 | CAG | TAA TAG | 1684-1686 | TGG | TGA TAA TAG |
| | 2780-2782 | CAG | TAA TAG | 1786-1788 | TGG | TGA TAA TAG |
| | 2801-2803 | TGG | TAA TGA TAG | 1852-1854 | CAA | TAA |
| | 2903-2905 | TGG | TAA TGA TAG | 1855-1857 | CAA | TAA |
| | 2969-2971 | CAA | TAA | | | |
| | 2972-2974 | CAA | TAA | | | |

*The corresponding amino acid position in SEQ ID NO: 120 and 126 corresponds to the number of the amino acid encoded by the amino acid codon at the indicated nucleotide positions in SEQ ID NO: 119 and 125, respectively, in the sequence listing.

TABLE 3e
Potential EMS-induced STOP codon mutations in exon 1, 2, 3
and 4 of BjGTR2-A2 and B2

| | BjGTR2-A2 | | | BnGTR2-B2 | | |
|---|---|---|---|---|---|---|
| | Nucleotide | | | Nucleotide | | |
| | position in | | | position in | | |
| | SEQ ID NO: | Wildtype | → Potential | SEQ ID NO: | Wildtype | → Potential |
| | 121 | codon | stop codons | 127 | codon | stop codons |
| E1 | 1069-1071 | CAG | TAA TAG | 413-415 | CAG | TAA TAG |
| | 1135-1137 | CAG | TAG TAA | 467-469 | CAA | TAA |
| | 1162-1164 | TGG | TAA TAG TGA | 479-481 | CAG | TAA TAG |
| | | | | 506-508 | TGG | TAA TAG TGA |
| E2 | | | | | | |
| E3 | 1892-1894 | CAA | TAA | 1334-1336 | CAA | TAA |
| | 1949-1951 | CAG | TAG TAA | 1391-1393 | CAG | TAA TAG |
| | 2036-2038 | CAG | TAG TAA | 1478-1480 | CAG | TAA TAG |
| | 2090-2092 | TGG | TAA TAG TGA | 1532-1534 | TGG | TAA TAG TGA |
| | 2117-2119 | CAG | TAA TAG | 1559-1561 | CAG | TAG TAA |
| | 2150-2152 | CAG | TAA TAG | 1592-1594 | CAG | TAA TAG |
| | 2165-2167 | TGG | TAA TGA TAG | 1607-1609 | TGG | TAA TAG TGA |
| | 2285-2287 | CAA | TAA | 1727-1729 | CAA | TAA |
| | 2333-2335 | CAG | TAA TAG | 1775-1777 | CAG | TAG TAA |
| | 2339-2341 | TGG | TAG TAA TGA | 1781-1783 | TGG | TAA TGA TAG |
| | 2402-2404 | CAG | TAA TAG | 1844-1846 | CAG | TAG TAA |
| E4 | 2555-2557 | TGG | TAG TAA TGA | 2011-2013 | TGG | TGA TAG TAA |
| | 2573-2575 | CAA | TAA | 2029-2031 | CAA | TAA |
| | 2576-2578 | CAA | TAA | 2032-2034 | CAA | TAA |
| | 2618-2620 | TGG | TGA TAG TAA | 2074-2076 | TGG | TGA TAG TAA |
| | 2654-2656 | CAA | TAA | 2110-2112 | CAA | TAA |
| | 2657-2659 | CAA | TAA | 2113-2115 | CAG | TAA TAG |
| | 2678-2680 | CAA | TAA | 2134-2136 | CAA | TAA |
| | 2687-2689 | CAG | TAG TAA | 2143-2145 | CAG | TAA TAG |
| | 2849-2851 | CAA | TAA | 2305-2307 | CAG | TAG TAA |
| | 2915-2917 | CGG | TAG TGA TAA | 2371-2373 | CGG | TGA TAA TAG |
| | 2963-2965 | CGG | TGA TAA TAG | 2419-2421 | CGG | TAG TAA TGA |
| | 2996-2998 | TGG | TAA TGA TAG | 2452-2454 | TGG | TAG TGA TAA |
| | 3008-3010 | CAG | TAA TAG | 2464-2466 | CAG | TAA TAG |
| | 3053-3055 | CAG | TAA TAG | 2509-2511 | CAG | TAG TAA |
| | 3074-3076 | CAG | TAA TAGH | 2530-2532 | CAG | TAG TAA |
| | 3182-3184 | CAG | TAG TAA | 2638-2640 | CAG | TAG TAA |
| | 3203-3205 | TGG | TGA TAG TAA | 2659-2661 | TGG | TGA TAG TAA |
| | 3305-3307 | TGG | TGA TAA TAG | 2761-2763 | TGG | TAG TGA TAA |
| | 3371-3373 | CAA | TAA | 2827-2829 | CAA | TAA |
| | 3374-3376 | CAA | TAA | 2930-2832 | CAA | TAA |

*The corresponding amino acid position in SEQ ID NO: 122 and 128 corresponds to the number of the amino acid encoded by the amino acid codon at the indicated nucleotide positions in SEQ ID NO: 121 and 127, respectively, in the sequence listing.

TABLE 3f
Potential EMS-induced STOP codon mutations in exon 1, 2, 3
and 4 of BjGTR2-A3 and B3

| | BjGTR2-A3 | | | BnGTR2-B3 | | |
|---|---|---|---|---|---|---|
| | Nucleotide | | | Nucleotide | | |
| | position in | | | position in | | |
| | SEQ ID NO: | Wildtype | → Potential | SEQ ID NO: | Wildtype | → Potential |
| | 123 | codon | stop codons | 129 | codon | stop codons |
| E1 | 72-74 | CAA | TAA | 829-831 | CAA | TAA |
| | 138-140 | CAG | TAG TAA | 877-879 | CAG | TAA TAG |
| | 165-167 | TGG | TAG TAA TGA | 904-906 | TGG | TAA TAG TGA |
| E2 | 543-545 | CGA | TGA TAA | 1357-1359 | CGA | TAA TGA |
| E3 | 711-713 | CAA | TAA | 1518-1520 | CAA | TAA |
| | 768-770 | CAG | TAG TAA | 1575-1577 | CAG | TAA TAG |
| | 855-857 | CAG | TAA TAG | 1662-1664 | CAG | TAA TAG |
| | 909-911 | TGG | TAA TGA TAG | 1716-1718 | TGG | TAA TAG TGA |
| | 936-938 | CAG | TAG TAA | 1743-1745 | CAG | TAG TAA |
| | 969-971 | CAG | TAA TAG | 1776-1778 | CAG | TAG TAA |
| | 984-986 | TGG | TAG TGA TAA | 1791-1793 | TGG | TAA TAG TGA |
| | 1152-1154 | CAG | TAA TAG | 1959-1961 | CAG | TAG TAA |
| | 1158-1160 | TGG | TAG TAA TGA | 1965-1967 | TGG | TAA TGA TAG |
| | 1221-1223 | CAA | TAA | 2028-2030 | CAA | TAA |
| E4 | 1496-1498 | TGG | TAA TAG TGA | 2297-2299 | TGG | TGA TAA TAG |
| | 1514-1516 | CAA | TAA | 2315-2317 | CAA | TAA |
| | 1517-1519 | CAA | TAA | 2318-2320 | CAA | TAA |
| | 1559-1561 | TGG | TGA TAA TAG | 2396-2398 | CAA | TAA |
| | 1595-1597 | CAA | TAA | 2399-2401 | CAA | TAA |
| | 1598-1600 | CAA | TAA | 2420-2422 | CAA | TAA |
| | 1619-1621 | CAA | TAA | 2429-2431 | CAG | TAG TAA |
| | 1628-1630 | CAG | TAG TAA | 2591-2593 | CAA | TAA |
| | 1790-1792 | CAA | TAA | 2705-2707 | CGG | TGA TAA TAG |
| | 1904-1906 | CGG | TGA TAA TAG | 2738-2740 | TGG | TAA TAG TGA |
| | 1937-1939 | TGG | TAG TGA TAA | 2750-2752 | CAG | TAG TAA |
| | 1949-1951 | CAG | TAA TAG | 2795-2797 | CAG | TAG TAA |
| | 1994-1996 | CAG | TAA TAG | 2816-2818 | CAG | TAA TAG |
| | 2015-2017 | CAG | TAA TAG | 2924-2926 | CAG | TAG TAA |
| | 2123-2125 | CAG | TAA TAG | 2945-2947 | TGG | TAA TGA TAG |
| | 2144-2146 | TGG | TGA TAG TAA | 3048-3049 | TGG | TGA TAG TAA |
| | 2246-2248 | TGG | TAG TGA TAA | 3116-3118 | CAA | TAA |
| | 2315-2317 | CAA | TAA | | | |

*The corresponding amino acid position in SEQ ID NO: 124 and 130 corresponds to the number of the amino acid encoded by the amino acid codon at the indicated nucleotide positions in SEQ ID NO: 123 and 129, respectively, in the sequence listing.

[0110] Obviously, mutations are not limited to the ones shown in the above tables and it is understood that analogous STOP codon mutations may be present in gtr alleles other than those depicted in the sequence listing and referred to in the tables above.

[0111] A missense mutation in a GTR allele, as used herein, is any mutation (deletion, insertion or substitution) in a GTR allele whereby one or more codons are changed into the coding DNA and the corresponding mRNA sequence of the corresponding wild type GTR allele, resulting in the substitution of one or more amino acids in the wild type GTR protein for one or more other amino acids in the mutant GTR protein. In one embodiment, a mutant GTR allele comprising a missense mutation is a GTR allele wherein one or more of the conserved amino acids indicated above is/are substituted. In another embodiment, a mutant GTR allele comprising a missense mutation is a GTR allele encoding a GTR protein wherein an amino acid at a position corresponding to position 126, 145, 192 or 359 in SEQ ID NO: 66 is substituted, such as those indicated in Table 7 of Example 3 below.

[0112] A frameshift mutation in a GTR allele, as used herein, is a mutation (deletion, insertion, duplication, and the like) in a GTR allele that results in the nucleic acid sequence being translated in a different frame downstream of the mutation. As indicated above splice site mutations can result in frameshifts. Possible EMS-induced splice site mutations in Arabidopsis and Brassica GTR sequences provided herein are those which result in a mutation at the GU-donor site at the 5′ splice site or at the AG-acceptor site at the 3′ splice site indicated in the sequence listing, for example which result in a G/C to A/T transition in these sites.

[0113] Amino Acid Sequences According to the Invention

[0114] Provided are both wild type (functional) GTR amino acid sequences and mutant GTR amino acid sequences (comprising one or more mutations, preferably mutations which result in a significantly reduced or no GSL transport activity of the GTR protein) from Brassicaceae, particularly from Brassica species, especially from Brassica napus, but also from other Brassica crop species. For example, Brassica species comprising an A and/or a C or a B genome may encode different GTR-A, GTR-B or GTR-C amino acids. In addition, mutagenesis methods can be used to generate mutations in wild type GTR alleles, thereby generating mutant alleles which can encode further mutant GTR proteins. In one embodiment the wild type and/or mutant GTR amino acid sequences are provided within a Brassica plant (i.e. endogenously). However, isolated GTR amino acid sequences (e.g. isolated from the plant or made synthetically), as well as variants thereof and fragments of any of these are also provided herein.

[0115] “GTR amino acid sequence” or “GTR variant amino acid sequence” according to the invention are amino acid sequences having at least 33%, at least 34%, at least 35%, at least 36%, at least 37%, at least 38%, at least 39%, at least 40%, at least 41%, at least 42%, at least 43%, at least 44%, at least 45%, at least 46%, at least 47%, at least 48%, at least 49%, at least 50%, at least 55%, at least 56%, at least 57%, at least 58%, at least 59%, at least 60%, at least 61%, at least 62%, at least 63%, at least 64%, at least 65%, at least 70%, at least 75%, at least 76%, at least 77%, at least 78%, at least 79%, at least 80%, at least 85%, at least 90%, at least 95%, 98%, 99% or 100% sequence identity with SEQ ID NO: 2. These amino acid sequences may also be referred to as being “essentially similar” or “essentially identical” to the GTR sequences provided in the sequence listing.

[0116] Amino acid sequences of GTR1 to 6 proteins have been isolated from Arabidopsis, of GTRx-Ay proteins from B. rapa, B. juncea and from B. napus and of GTRx-Cy proteins from B. oleracea and from B. napus and of GTRx-By proteins from B. juncea as depicted in the sequence listing. The wild type GTR amino acid sequences are depicted, while mutant sequences of these sequences, and of sequences essentially similar to these, are described herein below and in the Examples, with reference to the wild type GTR amino acid sequences.

[0117] “GTR1, 2, 3, 4, 5 or 6 amino acid sequences” or “GTR1, 2, 3, 4, 5 or 6 variant amino acid sequences” according to the invention are amino acid sequences having at least 75%, at least 80%, at least 81%, at least 82%, at least 83%, at least 84%, at least 85%, at least 86%, at least 87%, at least 88%, at least 89%, at least 90%, at least 91%, at least 92%, at least 93%, at least 94%, at least 95%, 96%, 97%, 98%, 99% or 100% sequence identity with SEQ ID NO: 2, 4, 6, 8, 10 or 12, respectively. These amino acid sequences may also be referred to as being “essentially similar” or “essentially identical” to the GTR sequences provided in the sequence listing.

[0118] Thus, the invention provides both amino acid sequences of wild type, functional GTR1, 2, 3, 4, 5 or 6 proteins, including variants and fragments thereof (as defined further below), as well as mutant amino acid sequences of any of these, whereby the mutation in the amino acid sequence preferably results in a significant reduction in or a complete abolishment of the GSL transport activity of the GTR protein as compared to the GSL transport activity of the corresponding wild type GTR protein. A significant reduction in or complete abolishment of the GSL transport activity of the GTR protein refers herein to a reduction in or abolishment of the GSL transport activity of the GTR protein, such that the GSL content is modified in specific parts of a plant expressing the mutant GTR protein as compared to a plant expressing the corresponding wild type GTR protein.

[0119] Both endogenous and isolated amino acid sequences are provided herein. Also provided are fragments of the GTR amino acid sequences and GTR variant amino acid sequences defined above. A “fragment” of a GTR amino acid sequence or variant thereof (as defined) may be of various lengths, such as at least 10, 12, 15, 18, 20, 50, 100, 150, 175, 180 contiguous amino acids of the GTR sequence (or of the variant sequence).

[0120] Amino Acid Sequences of Functional GTR Proteins

[0121] The amino acid sequences depicted in the sequence listing encode wild type, functional GTR proteins from Arabidopsis, B. rapa, B. oleracea, B. juncea and B. napus. Thus, these sequences are endogenous to the plants from which they were isolated. Other Brassicaceae plants, including Brassica crop species, varieties, breeding lines or wild accessions, may be screened for other functional GTR proteins with the same amino acid sequences or variants thereof, as described above.

[0122] In addition, it is understood that GTR amino acid sequences and variants thereof (or fragments of any of these) may be identified in silico, by screening amino acid databases for essentially similar sequences. Fragments of amino acid molecules according to the invention are also provided. Fragments include amino acid sequences of conserved and functional domains as indicated above.

[0123] Amino Acid Sequences of Mutant GTR Proteins

[0124] Amino acid sequences comprising one or more amino acid deletions, insertions or substitutions relative to the wild type amino acid sequences are another embodiment of the invention, as are fragments of such mutant amino acid molecules. Such mutant amino acid sequences can be generated and/or identified using various known methods, as described above. Again, such amino acid molecules are provided both in endogenous form and in isolated form.

[0125] In one embodiment, the mutation(s) in the amino acid sequence result in a significantly reduced or completely abolished GSL transport activity of the GTR protein relative to the wild type protein. As described above, basically, any mutation which results in a protein comprising at least one amino acid insertion, deletion and/or substitution relative to the wild type protein can lead to significantly reduced or no GSL transport activity. It is, however, understood that mutations in certain parts of the protein are more likely to result in a reduced function of the mutant GTR protein, such as mutations leading to truncated proteins, whereby significant portions of the functional domains, such as transmembrane domains or substrate binding domains, are lacking or are being substituted. In one aspect, a mutant GTR protein comprising a missense mutation in a transmembrane domain is a GTR protein wherein an amino acid at a position corresponding to position 126 or to position 359 in SEQ ID NO: 66 is substituted, such as the mutant GTR protein indicated in Table 7 of Example 3 below.

[0126] Thus in one embodiment, mutant GTR proteins are provided comprising one or more deletion or insertion mutations, whereby the deletion(s) or insertion(s) result(s) in a mutant protein which has significantly reduced or no activity in vivo. Such mutant GTR proteins are GTR proteins wherein at least 1, at least 2, 3, 4, 5, 10, 20, 30, 50, 100, 100, 150, 175, 180 or more amino acids are deleted or inserted as compared to the wild type GTR protein, whereby the deletion(s) or insertion(s) result(s) in a mutant protein which has significantly reduced or no activity in vivo.

[0127] In another embodiment, mutant GTR proteins are provided which are truncated whereby the truncation results in a mutant protein that has significantly reduced or no activity in vivo. Such truncated GTR proteins are GTR proteins which lack functional domains in the C-terminal part of the corresponding wild type GTR protein and which maintain the N-terminal part of the corresponding wild type GTR protein. The more truncated the mutant protein is in comparison to the wild type protein, the more the truncation may result in a significantly reduced or no activity of the GTR protein.

[0128] In yet another embodiment, mutant GTR proteins are provided comprising one or more substitution mutations, whereby the substitution(s) result(s) in a mutant protein that has significantly reduced or no activity in vivo. Such mutant GTR proteins are GTR proteins whereby conserved amino acid residues which have a specific function, such as a function in substrate or proton binding, are substituted.

[0129] Also provided are variant GTR proteins which are changed in their phosphorylation/dephosphorylation status. Examples of such proteins are GTR1 or GTR2 proteins as herein described wherein the Serine or Threonine residues of phosphorylation sites are substituted for Aspartic acid (mimicking constitutive phosphorylation at that site) or for Alanine (mimicking constitutive dephosphorylation at that site) such as the GTR1 protein comprising the amino acid sequence of SEQ ID NO: 2 with the following substitutions:
[0130] a. S at position 22 for A
[0131] b. S at position 22 for D
[0132] c. T at position 105 for A
[0133] d. T at position 105 for D
[0134] e. S at position 605 for A
[0135] f. S at position 605 for D
   or the GTR1 protein comprising the amino acid sequence of SEQ ID NO: 142 with the following substitutions:
[0136] g. S at position 52 for A
[0137] h. S at position 52 for D
[0138] i. T at position 135 for A
[0139] j. T at position 135 for D
[0140] k. S at position 635 for A
[0141] l. S at position 635 for D
   or a GTR2 protein comprising the amino acid sequence of SEQ ID No: 4 with the following substitutions:
[0142] m. T at position 58 for A
[0143] n. T at position 58 for D
[0144] o. T at position 117 for A
[0145] p. T at position 117 for D
[0146] q. T at position 323 for A
[0147] r. T at position 323 for D
   Corresponding substitutions may be made in the GTR1 and GTR2 proteins from Brassica species, such as the ones described herein.

[0148] Methods According to the Invention

[0149] Mutant gtr alleles may be generated (for example induced by mutagenesis) and/or identified using a range of methods, which are conventional in the art, for example using PCR based methods to amplify part or all of the gtr genomic or cDNA.

[0150] Following mutagenesis, plants are grown from the treated seeds, or regenerated from the treated cells using known techniques. For instance, mutagenized seeds may be planted in accordance with conventional growing procedures and following self-pollination seed is formed on the plants. Alternatively, doubled haploid plantlets may be extracted from treated microspore or pollen cells to immediately form homozygous plants, for example as described by Coventry et al. (1988, Manual for Microspore Culture Technique for Brassica napus. Dep. Crop Sci. Techn. Bull. OAC Publication 0489. Univ. of Guelph, Guelph, Ontario, Canada). Additional seed which is formed as a result of such self-pollination in the present or a subsequent generation may be harvested and screened for the presence of mutant GTR alleles, using techniques which are conventional in the art, for example polymerase chain reaction (PCR) based techniques (amplification of the gtr alleles) or hybridization based techniques, e.g. Southern blot analysis, BAC library screening, and the like, and/or direct sequencing of gtr alleles. Several techniques are known to screen for specific mutant alleles, e.g., Deleteagene™ (Delete-a-gene; Li et al., 2001, Plant J 27: 235-242) uses polymerase chain reaction (PCR) assays to screen for deletion mutants generated by fast neutron mutagenesis, TILLING (targeted induced local lesions in genomes; McCallum et al., 2000, Nat Biotechnol 18:455-457) identifies EMS-induced point mutations, etc. To screen for the presence of point mutations (so called Single Nucleotide Polymorphisms or SNPs) in mutant GTR alleles, SNP detection methods conventional in the art can be used, for example oligoligation-based techniques, single base extension-based techniques or techniques based on differences in restriction sites, such as TILLING.

[0151] As described above, mutagenization (spontaneous as well as induced) of a specific wild-type GTR allele results in the presence of one or more deleted, inserted, or substituted nucleotides (hereinafter called “mutation region”) in the resulting mutant GTR allele. The mutant GTR allele can thus be characterized by the location and the configuration of the one or more deleted, inserted, or substituted nucleotides in the wild type GTR allele. The site in the wild type GTR allele where the one or more nucleotides have been inserted, deleted, or substituted, respectively, is herein also referred to as the “mutation region or sequence”. A “5′ or 3′ flanking region or sequence” as used herein refers to a DNA region or sequence in the mutant (or the corresponding wild type) GTR allele of at least 20 bp, preferably at least 50 bp, at least 750 bp, at least 1500 bp, and up to 5000 bp of DNA different from the DNA containing the one or more deleted, inserted, or substituted nucleotides, preferably DNA from the mutant (or the corresponding wild type) GTR allele which is located either immediately upstream of and contiguous with (5′ flanking region or sequence“) or immediately downstream of and contiguous with (3′ flanking region or sequence”) the mutation region in the mutant GTR allele (or in the corresponding wild type GTR allele). A “joining region” as used herein refers to a DNA region in the mutant (or the corresponding wild type) GTR allele where the mutation region and the 5′ or 3′ flanking region are linked to each other. A “sequence spanning the joining region between the mutation region and the 5′ or 3′ flanking region thus comprises a mutation sequence as well as the flanking sequence contiguous therewith.

[0152] The tools developed to identify a specific mutant GTR allele or the plant or plant material comprising a specific mutant GTR allele, or products which comprise plant material comprising a specific mutant GTR allele are based on the specific genomic characteristics of the specific mutant GTR allele as compared to the genomic characteristics of the corresponding wild type GTR allele, such as, a specific restriction map of the genomic region comprising the mutation region, molecular markers or the sequence of the flanking and/or mutation regions.

[0153] Once a specific mutant GTR allele has been sequenced, primers and probes can be developed which specifically recognize a sequence within the 5′ flanking, 3′ flanking and/or mutation regions of the mutant GTR allele in the nucleic acid (DNA or RNA) of a sample by way of a molecular biological technique. For instance a PCR method can be developed to identify the mutant GTR allele in biological samples (such as samples of plants, plant material or products comprising plant material). Such a PCR is based on at least two specific “primers”: one recognizing a sequence within the 5′ or 3′ flanking region of the mutant GTR allele and the other recognizing a sequence within the 3′ or 5′ flanking region of the mutant GTR allele, respectively; or one recognizing a sequence within the 5′ or 3′ flanking region of the mutant GTR allele and the other recognizing a sequence within the mutation region of the mutant GTR allele; or one recognizing a sequence within the 5′ or 3′ flanking region of the mutant GTR allele and the other recognizing a sequence spanning the joining region between the 3′ or 5′ flanking region and the mutation region of the specific mutant GTR allele (as described further below), respectively.

[0154] The primers preferably have a sequence of between 15 and 35 nucleotides which under optimized PCR conditions “specifically recognize” a sequence within the 5′ or 3′ flanking region, a sequence within the mutation region, or a sequence spanning the joining region between the 3′ or 5′ flanking and mutation regions of the specific mutant GTR allele, so that a specific fragment (“mutant GTR specific fragment” or discriminating amplicon) is amplified from a nucleic acid sample comprising the specific mutant GTR allele. This means that only the targeted mutant GTR allele, and no other sequence in the plant genome, is amplified under optimized PCR conditions.

[0155] PCR primers suitable for the invention may be the following:
[0156] oligonucleotides ranging in length from 17 nt to about 200 nt, comprising a nucleotide sequence of at least 17 consecutive nucleotides, preferably 20 consecutive nucleotides selected from the 5′ or 3′ flanking sequence of a specific mutant GTR allele or the complement thereof (i.e., for example, the sequence 5′ or 3′ flanking the one or more nucleotides deleted, inserted or substituted in the mutant GTR alleles of the invention, such as the sequence 5′ or 3′ flanking the non-sense, mis-sense or frameshift mutations described above or the sequence 5′ or 3′ flanking the STOP codon mutations indicated in the above Tables or the substitution mutations indicated above or the complement thereof) (primers recognizing 5′ flanking sequences); or
[0157] oligonucleotides ranging in length from 17 nt to about 200 nt, comprising a nucleotide sequence of at least 17 consecutive nucleotides, preferably 20 nucleotides selected from the sequence of the mutation region of a specific mutant GTR allele or the complement thereof (i.e., for example, the sequence of nucleotides inserted or substituted in the GTR genes of the invention or the complement thereof) (primers recognizing mutation sequences).

[0158] The primers may of course be longer than the mentioned 17 consecutive nucleotides, and may e.g. be 18, 19, 20, 21, 30, 35, 50, 75, 100, 150, 200 nt long or even longer. The primers may entirely consist of nucleotide sequence selected from the mentioned nucleotide sequences of flanking and mutation sequences. However, the nucleotide sequence of the primers at their 5′ end (i.e. outside of the 3′-located 17 consecutive nucleotides) is less critical. Thus, the 5′ sequence of the primers may consist of a nucleotide sequence selected from the flanking or mutation sequences, as appropriate, but may contain several (e.g. 1, 2, 5, 10) mismatches. The 5′ sequence of the primers may even entirely consist of a nucleotide sequence unrelated to the flanking or mutation sequences, such as e.g. a nucleotide sequence representing restriction enzyme recognition sites. Such unrelated sequences or flanking DNA sequences with mismatches should preferably be not longer than 100, more preferably not longer than 50 or even 25 nucleotides.

[0159] Moreover, suitable primers may comprise or consist of a nucleotide sequence spanning the joining region between flanking and mutation sequences (i.e., for example, the joining region between a sequence 5′ or 3′ flanking one or more nucleotides deleted, inserted or substituted in the mutant GTR alleles of the invention and the sequence of the one or more nucleotides inserted or substituted or the sequence 3′ or 5′, respectively, flanking the one or more nucleotides deleted, such as the joining region between a sequence 5′ or 3′ flanking non-sense, missense or frameshift mutations in the GTR genes of the invention described above and the sequence of the non-sense, missense or frameshift mutations, or the joining region between a sequence 5′ or 3′ flanking a potential STOP codon mutation as indicated in the above Tables or the substitution mutations indicated above and the sequence of the potential STOP codon mutation or the substitution mutations, respectively), provided the nucleotide sequence is not derived exclusively from either the mutation region or flanking regions.

[0160] It will also be immediately clear to the skilled artisan that properly selected PCR primer pairs should also not comprise sequences complementary to each other.

[0161] For the purpose of the invention, the “complement of a nucleotide sequence represented in SEQ ID No: X” is the nucleotide sequence which can be derived from the represented nucleotide sequence by replacing the nucleotides through their complementary nucleotide according to Chargaff's rules (A [symbol] T; G [symbol] C) and reading the sequence in the 5′ to 3′ direction, i.e. in opposite direction of the represented nucleotide sequence.

[0162] Examples of primers suitable to identify specific mutant GTR alleles are described in the Examples.

[0163] As used herein, “the nucleotide sequence of SEQ ID No. Z from position X to position Y” indicates the nucleotide sequence including both nucleotide endpoints.

[0164] Preferably, the amplified fragment has a length of between 50 and 1000 nucleotides, such as a length between 50 and 500 nucleotides, or a length between 100 and 350 nucleotides. The specific primers may have a sequence which is between 80 and 100% identical to a sequence within the 5′ or 3′ flanking region, to a sequence within the mutation region, or to a sequence spanning the joining region between the 3′ or 5′ flanking and mutation regions of the specific mutant GTR allele, provided the mismatches still allow specific identification of the specific mutant GTR allele with these primers under optimized PCR conditions. The range of allowable mismatches however, can easily be determined experimentally and are known to a person skilled in the art.

[0165] Detection and/or identification of a “mutant GTR specific fragment” can occur in various ways, e.g., via size estimation after gel or capillary electrophoresis or via fluorescence-based detection methods. The mutant GTR specific fragments may also be directly sequenced. Other sequence specific methods for detection of amplified DNA fragments are also known in the art.

[0166] Standard PCR protocols are described in the art, such as in ‘PCR Applications Manual” (Roche Molecular Biochemicals, 2nd Edition, 1999) and other references. The optimal conditions for the PCR, including the sequence of the specific primers, is specified in a “PCR identification protocol” for each specific mutant GTR allele. It is however understood that a number of parameters in the PCR identification protocol may need to be adjusted to specific laboratory conditions, and may be modified slightly to obtain similar results. For instance, use of a different method for preparation of DNA may require adjustment of, for instance, the amount of primers, polymerase, MgCl₂ concentration or annealing conditions used. Similarly, the selection of other primers may dictate other optimal conditions for the PCR identification protocol. These adjustments will however be apparent to a person skilled in the art, and are furthermore detailed in current PCR application manuals such as the one cited above.

[0167] Examples of PCR identification protocols to identify specific mutant GTR alleles are described in the Examples.

[0168] Alternatively, specific primers can be used to amplify a mutant GTR specific fragment that can be used as a “specific probe” for identifying a specific mutant GTR allele in biological samples. Contacting nucleic acid of a biological sample, with the probe, under conditions that allow hybridization of the probe with its corresponding fragment in the nucleic acid, results in the formation of a nucleic acid/probe hybrid. The formation of this hybrid can be detected (e.g. labeling of the nucleic acid or probe), whereby the formation of this hybrid indicates the presence of the specific mutant GTR allele. Such identification methods based on hybridization with a specific probe (either on a solid phase carrier or in solution) have been described in the art. The specific probe is preferably a sequence that, under optimized conditions, hybridizes specifically to a region within the 5′ or 3′ flanking region and/or within the mutation region of the specific mutant GTR allele (hereinafter referred to as “mutant GTR specific region”). Preferably, the specific probe comprises a sequence of between 10 and 1000 bp, 50 and 600 bp, between 100 to 500 bp, between 150 to 350 bp, which is at least 80%, preferably between 80 and 85%, more preferably between 85 and 90%, especially preferably between 90 and 95%, most preferably between 95% and 100% identical (or complementary) to the nucleotide sequence of a specific region. Preferably, the specific probe will comprise a sequence of about 13 to about 100 contiguous nucleotides identical (or complementary) to a specific region of the specific mutant GTR allele.

[0169] Specific probes suitable for the invention may be the following:
[0170] oligonucleotides ranging in length from 13 nt to about 1000 nt, comprising a nucleotide sequence of at least 13 consecutive nucleotides selected from the 5′ or 3′ flanking sequence of a specific mutant GTR allele or the complement thereof (i.e., for example, the sequence 5′ or 3′ flanking the one or more nucleotides deleted, inserted or substituted in the mutant GTR alleles of the invention, such as the sequence 5′ or 3′ flanking the non-sense, mis-sense or frameshift mutations described above or the sequence 5′ or 3′ flanking the potential STOP codon mutations indicated in the above Tables or the substitution mutations indicated above), or a sequence having at least 80% sequence identity therewith (probes recognizing 5′ flanking sequences); or
[0171] oligonucleotides ranging in length from 13 nt to about 1000 nt, comprising a nucleotide sequence of at least 13 consecutive nucleotides selected from the mutation sequence of a specific mutant GTR allele or the complement thereof (i.e., for example, the sequence of nucleotides inserted or substituted in the GTR genes of the invention, or the complement thereof), or a sequence having at least 80% sequence identity therewith (probes recognizing mutation sequences).

[0172] The probes may entirely consist of nucleotide sequence selected from the mentioned nucleotide sequences of flanking and mutation sequences. However, the nucleotide sequence of the probes at their 5′ or 3′ ends is less critical. Thus, the 5′ or 3′ sequences of the probes may consist of a nucleotide sequence selected from the flanking or mutation sequences, as appropriate, but may consist of a nucleotide sequence unrelated to the flanking or mutation sequences. Such unrelated sequences should preferably be not longer than 50, more preferably not longer than 25 or even not longer than 20 or 15 nucleotides.

[0173] Moreover, suitable probes may comprise or consist of a nucleotide sequence spanning the joining region between flanking and mutation sequences (i.e., for example, the joining region between a sequence 5′ or 3′ flanking one or more nucleotides deleted, inserted or substituted in the mutant GTR alleles of the invention and the sequence of the one or more nucleotides inserted or substituted or the sequence 3′ or 5′, respectively, flanking the one or more nucleotides deleted, such as the joining region between a sequence 5′ or 3′ flanking non-sense, mis-sense or frameshift mutations in the GTR genes of the invention described above and the sequence of the non-sense, mis-sense or frameshift mutations, or the joining region between a sequence 5′ or 3′ flanking a potential STOP codon mutation as indicated in the above Tables or the substitution mutations indicated above and the sequence of the potential STOP codon or substitution mutation, respectively), provided the mentioned nucleotide sequence is not derived exclusively from either the mutation region or flanking regions.

[0174] Examples of specific probes suitable to identify specific mutant GTR alleles are described in the Examples.

[0175] Detection and/or identification of a “mutant GTR specific region” hybridizing to a specific probe can occur in various ways, e.g., via size estimation after gel electrophoresis or via fluorescence-based detection methods. Other sequence specific methods for detection of a “mutant GTR specific region” hybridizing to a specific probe are also known in the art.

[0176] Alternatively, plants or plant parts comprising one or more mutant gtr alleles can be generated and identified using other methods, such as the “Delete-a-gene™” method which uses PCR to screen for deletion mutants generated by fast neutron mutagenesis (reviewed by Li and Zhang, 2002, Funct Integr Genomics 2:254-258), by the TILLING (Targeting Induced Local Lesions IN Genomes) method which identifies EMS-induced point mutations using denaturing high-performance liquid chromatography (DHPLC) to detect base pair changes by heteroduplex analysis (McCallum et al., 2000, Nat Biotech 18:455, and McCallum et al. 2000, Plant Physiol. 123, 439-442), etc. As mentioned, TILLING uses high-throughput screening for mutations (e.g. using Cel 1 cleavage of mutant-wildtype DNA heteroduplexes and detection using a sequencing gel system). Thus, the use of TILLING to identify plants or plant parts comprising one or more mutant gtr alleles and methods for generating and identifying such plants, plant organs, tissues and seeds is encompassed herein. Thus in one embodiment, the method according to the invention comprises the steps of mutagenizing plant seeds (e.g. EMS mutagenesis), pooling of plant individuals or DNA, PCR amplification of a region of interest, heteroduplex formation and high-throughput detection, identification of the mutant plant, sequencing of the mutant PCR product. It is understood that other mutagenesis and selection methods may equally be used to generate such mutant plants.

[0177] Instead of inducing mutations in GTR alleles, natural (spontaneous) mutant alleles may be identified by methods known in the art. For example, ECOTILLING may be used (Henikoff et al. 2004, Plant Physiology 135(2):630-6) to screen a plurality of plants or plant parts for the presence of natural mutant gtr alleles. As for the mutagenesis techniques above, preferably Brassica species are screened which comprise an A and/or a C genome, so that the identified gtr allele can subsequently be introduced into other Brassica species, such as Brassica napus, by crossing (inter- or intraspecific crosses) and selection. In ECOTILLING natural polymorphisms in breeding lines or related species are screened for by the TILLING methodology described above, in which individual or pools of plants are used for PCR amplification of the gtr target, heteroduplex formation and high-throughput analysis. This can be followed by selecting individual plants having a required mutation that can be used subsequently in a breeding program to incorporate the desired mutant allele.

[0178] The identified mutant alleles can then be sequenced and the sequence can be compared to the wild type allele to identify the mutation(s). Optionally functionality can be tested as indicated above. Using this approach a plurality of mutant gtr alleles (and Brassica plants comprising one or more of these) can be identified. The desired mutant alleles can then be combined with the desired wild type alleles by crossing and selection methods as described further below. Finally a single plant comprising the desired number of mutant gtr and the desired number of wild type GTR alleles is generated.

[0179] Oligonucleotides suitable as PCR primers or specific probes for detection of a specific mutant GTR allele can also be used to develop methods to determine the zygosity status of the specific mutant GTR allele.

[0180] To determine the zygosity status of a specific mutant GTR allele, a PCR-based assay can be developed to determine the presence of a mutant and/or corresponding wild type GTR specific allele:

[0181] To determine the zygosity status of a specific mutant GTR allele, two primers specifically recognizing the wild-type GTR allele can be designed in such a way that they are directed towards each other and have the mutation region located in between the primers. These primers may be primers specifically recognizing the 5′ and 3′ flanking sequences, respectively. This set of primers allows simultaneous diagnostic PCR amplification of the mutant, as well as of the corresponding wild type GTR allele.

[0182] Alternatively, to determine the zygosity status of a specific mutant GTR allele, two primers specifically recognizing the wild-type GTR allele can be designed in such a way that they are directed towards each other and that one of them specifically recognizes the mutation region. These primers may be primers specifically recognizing the sequence of the 5′ or 3′ flanking region and the mutation region of the wild type GTR allele, respectively. This set of primers, together with a third primer which specifically recognizes the sequence of the mutation region in the mutant GTR allele, allow simultaneous diagnostic PCR amplification of the mutant GTR gene, as well as of the wild type GTR gene.

[0183] Alternatively, to determine the zygosity status of a specific mutant GTR allele, two primers specifically recognizing the wild-type GTR allele can be designed in such a way that they are directed towards each other and that one of them specifically recognizes the joining region between the 5′ or 3′ flanking region and the mutation region. These primers may be primers specifically recognizing the 5′ or 3′ flanking sequence and the joining region between the mutation region and the 3′ or 5′ flanking region of the wild type GTR allele, respectively. This set of primers, together with a third primer which specifically recognizes the joining region between the mutation region and the 3′ or 5′ flanking region of the mutant GTR allele, respectively, allow simultaneous diagnostic PCR amplification of the mutant GTR gene, as well as of the wild type GTR gene.

[0184] Alternatively, the zygosity status of a specific mutant GTR allele can be determined by using alternative primer sets that specifically recognize mutant and wild type GTR alleles.

[0185] If the plant is homozygous for the mutant GTR gene or the corresponding wild type GTR gene, the diagnostic PCR assays described above will give rise to a single PCR product typical, preferably typical in length, for either the mutant or wild type GTR allele. If the plant is heterozygous for the mutant GTR allele, two specific PCR products will appear, reflecting both the amplification of the mutant and the wild type GTR allele.

[0186] Identification of the wild type and mutant GTR specific PCR products can occur e.g. by size estimation after gel or capillary electrophoresis (e.g. for mutant GTR alleles comprising a number of inserted or deleted nucleotides which results in a size difference between the fragments amplified from the wild type and the mutant GTR allele, such that said fragments can be visibly separated on a gel); by evaluating the presence or absence of the two different fragments after gel or capillary electrophoresis, whereby the diagnostic PCR amplification of the mutant GTR allele can, optionally, be performed separately from the diagnostic PCR amplification of the wild type GTR allele; by direct sequencing of the amplified fragments; or by fluorescence-based detection methods.

[0187] Examples of primers suitable to determine the zygosity of specific mutant GTR alleles are described in the Examples.

[0188] Alternatively, to determine the zygosity status of a specific mutant GTR allele, a hybridization-based assay can be developed to determine the presence of a mutant and/or corresponding wild type GTR specific allele:

[0189] To determine the zygosity status of a specific mutant GTR allele, two specific probes recognizing the wild-type GTR allele can be designed in such a way that each probe specifically recognizes a sequence within the GTR wild type allele and that the mutation region is located in between the sequences recognized by the probes. These probes may be probes specifically recognizing the 5′ and 3′ flanking sequences, respectively. The use of one or, preferably, both of these probes allows simultaneous diagnostic hybridization of the mutant, as well as of the corresponding wild type GTR allele.

[0190] Alternatively, to determine the zygosity status of a specific mutant GTR allele, two specific probes recognizing the wild-type GTR allele can be designed in such a way that one of them specifically recognizes a sequence within the GTR wild type allele upstream or downstream of the mutation region, preferably upstream of the mutation region, and that one of them specifically recognizes the mutation region. These probes may be probes specifically recognizing the sequence of the 5′ or 3′ flanking region, preferably the 5′ flanking region, and the mutation region of the wild type GTR allele, respectively. The use of one or, preferably, both of these probes, optionally, together with a third probe which specifically recognizes the sequence of the mutation region in the mutant GTR allele, allow diagnostic hybridization of the mutant and of the wild type GTR gene.

[0191] Alternatively, to determine the zygosity status of a specific mutant GTR allele, a specific probe recognizing the wild-type GTR allele can be designed in such a way that the probe specifically recognizes the joining region between the 5′ or 3′ flanking region, preferably the 5′ flanking region, and the mutation region of the wild type GTR allele. This probe, optionally, together with a second probe that specifically recognizes the joining region between the 5′ or 3′ flanking region, preferably the 5′ flanking region, and the mutation region of the mutant GTR allele, allows diagnostic hybridization of the mutant and of the wild type GTR gene.

[0192] Alternatively, the zygosity status of a specific mutant GTR allele can be determined by using alternative sets of probes that specifically recognize mutant and wild type GTR alleles.

[0193] If the plant is homozygous for the mutant GTR gene or the corresponding wild type GTR gene, the diagnostic hybridization assays described above will give rise to a single specific hybridization product, such as one or more hybridizing DNA (restriction) fragments, typical, preferably typical in length, for either the mutant or wild type GTR allele. If the plant is heterozygous for the mutant GTR allele, two specific hybridization products will appear, reflecting both the hybridization of the mutant and the wild type GTR allele.

[0194] Identification of the wild type and mutant GTR specific hybridization products can occur e.g. by size estimation after gel or capillary electrophoresis (e.g. for mutant GTR alleles comprising a number of inserted or deleted nucleotides which results in a size difference between the hybridizing DNA (restriction) fragments from the wild type and the mutant GTR allele, such that said fragments can be visibly separated on a gel); by evaluating the presence or absence of the two different specific hybridization products after gel or capillary electrophoresis, whereby the diagnostic hybridization of the mutant GTR allele can, optionally, be performed separately from the diagnostic hybridization of the wild type GTR allele; by direct sequencing of the hybridizing DNA (restriction) fragments; or by fluorescence-based detection methods.

[0195] Examples of probes suitable to determine the zygosity of specific mutant GTR alleles are described in the Examples.

[0196] Furthermore, detection methods specific for a specific mutant GTR allele that differ from PCR- or hybridization-based amplification methods can also be developed using the specific mutant GTR allele specific sequence information provided herein. Such alternative detection methods include linear signal amplification detection methods based on invasive cleavage of particular nucleic acid structures, also known as Invader™ technology, (as described e.g. in U.S. Pat. No. 5,985,557 “Invasive Cleavage of Nucleic Acids”, U.S. Pat. No. 6,001,567 “Detection of Nucleic Acid sequences by Invader Directed Cleavage, incorporated herein by reference), RT-PCR-based detection methods, such as Taqman, or other detection methods, such as SNPlex. Briefly, in the Invader™ technology, the target mutation sequence may e.g. be hybridized with a labeled first nucleic acid oligonucleotide comprising the nucleotide sequence of the mutation sequence or a sequence spanning the joining region between the 5′ flanking region and the mutation region and with a second nucleic acid oligonucleotide comprising the 3′ flanking sequence immediately downstream and adjacent to the mutation sequence, wherein the first and second oligonucleotide overlap by at least one nucleotide. The duplex or triplex structure that is produced by this hybridization allows selective probe cleavage with an enzyme (Cleavase®) leaving the target sequence intact. The cleaved labeled probe is subsequently detected, potentially via an intermediate step resulting in further signal amplification.

[0197] A “kit”, as used herein, refers to a set of reagents for the purpose of performing the method of the invention, more particularly, the identification of a specific mutant GTR allele in biological samples or the determination of the zygosity status of plant material comprising a specific mutant GTR allele. More particularly, a preferred embodiment of the kit of the invention comprises at least two specific primers, as described above, for identification of a specific mutant GTR allele, or at least two or three specific primers for the determination of the zygosity status. Optionally, the kit can further comprise any other reagent described herein in the PCR identification protocol. Alternatively, according to another embodiment of this invention, the kit can comprise at least one specific probe, which specifically hybridizes with nucleic acid of biological samples to identify the presence of a specific mutant GTR allele therein, as described above, for identification of a specific mutant GTR allele, or at least two or three specific probes for the determination of the zygosity status. Optionally, the kit can further comprise any other reagent (such as but not limited to hybridizing buffer, label) for identification of a specific mutant GTR allele in biological samples, using the specific probe.

[0198] The kit of the invention can be used, and its components can be specifically adjusted, for purposes of quality control (e.g., purity of seed lots), detection of the presence or absence of a specific mutant GTR allele in plant material or material comprising or derived from plant material, such as but not limited to food or feed products.

[0199] The term “primer” as used herein encompasses any nucleic acid that is capable of priming the synthesis of a nascent nucleic acid in a template-dependent process, such as PCR. Typically, primers are oligonucleotides from 10 to 30 nucleotides, but longer sequences can be employed. Primers may be provided in double-stranded form, though the single-stranded form is preferred. Probes can be used as primers, but are designed to bind to the target DNA or RNA and need not be used in an amplification process.

[0200] The term “recognizing” as used herein when referring to specific primers, refers to the fact that the specific primers specifically hybridize to a nucleic acid sequence in a specific mutant GTR allele under the conditions set forth in the method (such as the conditions of the PCR identification protocol), whereby the specificity is determined by the presence of positive and negative controls.

[0201] The term “hybridizing”, as used herein when referring to specific probes, refers to the fact that the probe binds to a specific region in the nucleic acid sequence of a specific mutant GTR allele under standard stringency conditions. Standard stringency conditions as used herein refers to the conditions for hybridization described herein or to the conventional hybridizing conditions as described by Sambrook et al., 1989 (Molecular Cloning: A Laboratory Manual, Second Edition, Cold Spring Harbour Laboratory Press, NY) which for instance can comprise the following steps: 1) immobilizing plant genomic DNA fragments or BAC library DNA on a filter, 2) prehybridizing the filter for 1 to 2 hours at 65° C. in 6×SSC, 5×Denhardt's reagent, 0.5% SDS and 20 μg/ml denaturated carrier DNA, 3) adding the hybridization probe which has been labeled, 4) incubating for 16 to 24 hours, 5) washing the filter once for 30 min. at 68° C. in 6×SSC, 0.1% SDS, 6) washing the filter three times (two times for 30 min. in 30 ml and once for 10 min in 500 ml) at 68° C. in 2×SSC, 0.1% SDS, and 7) exposing the filter for 4 to 48 hours to X-ray film at −70° C.

[0202] As used in herein, a “biological sample” is a sample of a plant, plant material or product comprising plant material. The term “plant” is intended to encompass plant tissues, at any stage of maturity, as well as any cells, tissues, or organs taken from or derived from any such plant, including without limitation, any seeds, leaves, stems, flowers, roots, single cells, gametes, cell cultures, tissue cultures or protoplasts. “Plant material”, as used herein refers to material that is obtained or derived from a plant. Products comprising plant material relate to food, feed or other products that are produced using plant material or can be contaminated by plant material. It is understood that, in the context of the present invention, such biological samples are tested for the presence of nucleic acids specific for a specific mutant GTR allele, implying the presence of nucleic acids in the samples. Thus the methods referred to herein for identifying a specific mutant GTR allele in biological samples, relate to the identification in biological samples of nucleic acids that comprise the specific mutant GTR allele.

[0203] The present invention also relates to the combination of specific GTR alleles in one plant, to the transfer of one or more specific mutant GTR allele(s) from one plant to another plant, to the plants comprising one or more specific mutant GTR allele(s), the progeny obtained from these plants and to plant cells, plant parts, and plant seeds derived from these plants.

[0204] Thus, in one embodiment of the invention a method for combining two or more selected mutant GTR alleles in one plant is provided comprising the steps of:
[0205] (a) generating and/or identifying two or more plants each comprising one or more selected mutant GTR alleles, as described above,
[0206] (b) crossing a first plant comprising one or more selected mutant GTR alleles with a second plant comprising one or more other selected mutant GTR alleles, collecting F1 seeds from the cross, and, optionally, identifying an F1 plant comprising one or more selected mutant GTR alleles from the first plant with one or more selected mutant GTR alleles from the second plant, as described above,
[0207] (c) optionally, repeating step (b) until an F1 plant comprising all selected mutant GTR alleles is obtained,
[0208] (d) optionally,
   [0209] identifying an F1 plant, which is homozygous or heterozygous for a selected mutant GTR allele by determining the zygosity status of the mutant GTR alleles, as described above, or
   [0210] generating plants which are homozygous for one or more of the selected mutant GTR alleles by performing one of the following steps:
      [0211] extracting doubled haploid plants from treated microspore or pollen cells of F1 plants comprising the one or more selected mutant GTR alleles, as described above,
      [0212] selfing the F1 plants comprising the one or more selected mutant GTR allele(s) for one or more generations (y), collecting F1 Sy seeds from the selfings, and identifying F1 Sy plants, which are homozygous for the one or more mutant GTR allele, as described above.

[0213] In another embodiment of the invention a method for transferring one or more mutant GTR alleles from one plant to another plant is provided comprising the steps of:
[0214] (a) generating and/or identifying a first plant comprising one or more selected mutant GTR alleles, as described above, or generating the first plant by combining the one or more selected mutant GTR alleles in one plant, as described above (wherein the first plant is homozygous or heterozygous for the one or more mutant GTR alleles),
[0215] (b) crossing the first plant comprising the one or more mutant GTR alleles with a second plant not comprising the one or more mutant GTR alleles, collecting F1 seeds from the cross (wherein the seeds are heterozygous for a mutant GTR allele if the first plant was homozygous for that mutant GTR allele, and wherein half of the seeds are heterozygous and half of the seeds are azygous for, i.e. do not comprise, a mutant GTR allele if the first plant was heterozygous for that mutant GTR allele), and, optionally, identifying F1 plants comprising one or more selected mutant GTR alleles, as described above,
[0216] (c) backcrossing F1 plants comprising one or more selected mutant GTR alleles with the second plant not comprising the one or more selected mutant GTR alleles for one or more generations (x), collecting BCx seeds from the crosses, and identifying in every generation BCx plants comprising the one or more selected mutant GTR alleles, as described above,
[0217] (d) optionally, generating BCx plants which are homozygous for the one or more selected mutant GTR alleles by performing one of the following steps:
   [0218] extracting doubled haploid plants from treated microspore or pollen cells of BCx plants comprising the one or more desired mutant GTR allele(s), as described above,
   [0219] selfing the BCx plants comprising the one or more desired mutant GTR allele(s) for one or more generations (y), collecting BCx Sy seeds from the selfings, and identifying BCx Sy plants, which are homozygous for the one or more desired mutant GTR allele, as described above.

[0220] In one aspect of the invention, the first and the second plant are Brassicaceae plants, particularly Brassica plants, especially Brassica napus plants or plants from another Brassica crop species, such as Brassica rapa, B. juncea or Brassica oleracea. In another aspect of the invention, the first plant is a Brassicaceae plant, particularly a Brassica plant, especially a Brassica napus plant or a plant from another Brassica crop species, and the second plant is a plant from a Brassicaceae breeding line, particularly from a Brassica breeding line, especially from a Brassica napus breeding line or from a breeding line from another Brassica crop species. “Breeding line”, as used herein, is a preferably homozygous plant line distinguishable from other plant lines by a preferred genotype and/or phenotype that is used to produce hybrid offspring.

[0221] The inventors further found that seeds of Arabidopsis plants knocked out in either GTR1 or GTR2 transporters had no significant reduction and about 50% reduction in total aliphatic GSLs concentrations, respectively, compared to wildtype plants, and that seeds of Arabidopsis plants knocked out in both GTR1 and GTR2 transporters had a zero GSL seed phenotype. In addition, GSLs levels were decreased in inflorescences and in root tissue of gtr knockout plants compared to GSLs levels in these tissues in wildtype plants. Surprisingly, GSLs levels in senescent leaves from gtr knockout plants were high whereas, in wildtype plants, leaves become depleted in GSLs upon aging. In addition, GSLs levels in silique walls of gtr knockout plants increased compared to wildtype plants. Similar observations were made in B. rapa.

[0222] Thus, the inventors found that Brassicaceae plants, wherein the GTR activity is reduced, in particular the GTR2 activity or the GTR1 and GTR2 activity, have a decreased to undetectable GSL content in seed, inflorescence tissue and root tissue, while the levels of GSLs in green tissues (such as rosette leaves, cauline leaves, silique walls) remain high. The observations indicate that the GTR proteins of the present invention, in particular the GTR1 and GRT2 proteins, are essential components of a transport pathway involved in the transport of GSLs from green tissues, such as rosette leaves, cauline leaves and silique walls (so-called “source” tissues), into seeds, flowers and, at a certain period in the plant's life cycle, into the roots (so-called “sink” tissues).

[0223] In one embodiment, the invention provides a method to modify GSL transport in eukaryotic cells or organisms, such as Xenopus oocytes and plants, comprising modifying the functional GTR activity in said eukaryotic cells or organisms.

[0224] In another embodiment, the invention provides a method to modify the GSL content in plants and plant parts comprising modifying the functional GTR activity in said plant or plant parts.

[0225] Modification of the GSL content in plants and plant parts enables modifications to be made, for example, to meal quality of oilseeds crucifers, cancer preventive activity and flavour of horticultural crucifers, and/or resistance to herbivores and pathogens and biofumigative activity.

[0226] In one aspect, the GSL content is decreased in plant seed by reducing the functional GTR activity.

[0227] As used herein, “seed” comprises embryo, endosperm and/or seed coat.

[0228] In another aspect, the GSL content is increased or maintained in green plant tissue by reducing the functional GTR activity.

[0229] As used herein, “green plant tissue” refers to leaves, rosette leaves, cauline leaves and silique walls.

[0230] In yet another aspect, the GSL content is decreased in plant seed and increased in green plant tissue by reducing the functional GTR activity.

[0231] In one embodiment of the invention, the plant is a plant from the Brassicales or Capparales order having a high content of GSLs. Non-limiting examples of such plants are: plants of the Akaniaceae family, the Bataceae family, the Brassicaceae or Cruciferae family, the Capparaceae family, the Caricaceae family, the Gyrostemonaceae family, the Koeberliniaceae family, the Limnanthaceae family, the Moringaceae family, the Pentadiplandraceae family, the Resedaceae family, the Salvadoraceae family, the Setchellanthaceae family, the Tovariaceae family and the Tropaeolaceae family.

[0232] In a specific embodiment of the invention, the plant belongs to the Brassicaceae family. In an even more specific embodiment of the invention, the plant is a Brassica napus plant (such as rapeseed, canola and rutabaga), a Brassica rapa plant (such as Chinese cabbage and turnip), a Brassica oleracea plant (such as kale, cabbage, broccoli, cauliflower, Brussels sprouts and kohlrabi), a Brassica carinata plant (Abyssinian mustard), a Brassica juncea plant (Indian mustard) or a Brassica nigra plant (black mustard).

[0233] The most important crops for modification of seed meal quality by, e.g., reducing the GSL content in seed, are oilseed forms of Brassica spp. (e.g. B. napus, B. rapa (syn B. campestris), B. juncea and B. carinata).

[0234] For enhancement of flavour and cancer preventive properties by, e.g., increasing the GSL content in green plant tissues, the most important species are B. oleracea (including e.g. broccoli and cauliflower), horticultural forms of B. napus (e.g. swedes [=rutabaga, spp. napobrassica], oil seed rape) and B. rapa (including both turnips and Chinese cabbage [=pakchois]), cruciferous salads (including e.g. Eruca sativa and Diplotaxis tenuifolia) and horticultural forms of Raphanus (e.g. radish (Raphanus sativa)).

[0235] GSL content can be modified by reducing functional GTR activity. As used herein, “functional GTR activity” in a plant or plant part refers to the GTR activity as present in said plant or plant part. Functional GTR activity is the result of GTR gene expression level and GTR activity. Accordingly, the functional GTR activity in a plant or plant part can be reduced by down-regulating GTR gene expression level or by down-regulating GTR activity, or both and, according to the invention, the modification of GSL content of a plant, plant tissue, plant organ, plant part, or plant cell can be achieved by down-regulation of GTR gene expression level, by down-regulation of GTR activity, or both.

[0236] Conveniently, GTR gene expression level or GTR activity is controlled genetically by introduction of chimeric genes altering the GTR gene expression level and/or by introduction of chimeric genes altering the GTR activity and/or by alteration of the endogenous GTR-encoding genes.

[0237] In accordance with the invention, it is preferred that in order to modify GSL content, the functional GTR activity is reduced significantly. Preferably, the functional GTR activity in the target cells should be decreased about 75%, preferably about 80%, particularly about 90%, more particularly about 95%, more preferably about 100% of the normal level and/or activity in the target cells. Methods to determine the content of a specific protein such as the GTR proteins are well known to the person skilled in the art and include, but are not limited to (histochemical) quantification of such proteins using specific antibodies. A method to quantify GTR activity is described in the Examples below.

[0238] Thus in one embodiment of the invention, a method for modifying the GSL content of a plant or plant part comprises the step of down-regulating GTR gene expression. In another embodiment of the invention, a method for modifying the GSL content of a plant, plant tissue, plant organ, plant part, or plant cell comprises down-regulating GTR activity.

[0239] In an embodiment of the invention, GTR gene expression is down-regulated by introducing a chimeric DNA construct in the plant or plant part comprising the following operably linked DNA regions:
[0240] a) a plant-expressible promoter which functions in the plant or plant part;
[0241] b) a DNA region which when transcribed yields a GTR-inhibitory RNA molecule capable of down-regulating GTR gene expression; and
[0242] c) a DNA region involved in transcription termination and polyadenylation, functional in plant cells.

[0243] The transcribed DNA region encodes a biologically active RNA which decreases the levels of GTR mRNAs available for translation. This can be achieved through well established techniques including co-suppression (sense RNA suppression), antisense RNA, double-stranded RNA (dsRNA), or microRNA (miRNA).

[0244] In one embodiment, GTR gene expression may be down-regulated by introducing a chimeric DNA construct which yields a sense RNA molecule capable of down-regulating GTR gene expression by co-suppression. The transcribed DNA region will yield upon transcription a so-called sense RNA molecule capable of reducing the expression of a GTR gene in the target plant or plant cell in a transcriptional or post-transcriptional manner. The transcribed DNA region (and resulting RNA molecule) comprises at least 20 consecutive nucleotides having at least 95% sequence identity to the nucleotide sequence of a GTR-encoding gene present in the plant cell or plant.

[0245] In another embodiment, GTR gene expression may be down-regulated by introducing a chimeric DNA construct which yields an antisense RNA molecule capable of down-regulating GTR gene expression. The transcribed DNA region will yield upon transcription a so-called antisense RNA molecule capable of reducing the expression of a GTR gene in the target plant or plant cell in a transcriptional or post-transcriptional manner. The transcribed DNA region (and resulting RNA molecule) comprises at least 20 consecutive nucleotides having at least 95% sequence identity to the complement of the nucleotide sequence of a GTR-encoding gene present in the plant cell or plant.

[0246] However, the minimum nucleotide sequence of the antisense or sense RNA region of about 20 nt of the GTR-encoding region may be comprised within a larger RNA molecule, varying in size from 20 nt to a length equal to the size of the target gene. The mentioned antisense or sense nucleotide regions may thus be about from about 21 nt to about 5000 nt long, such as 21 nt, 40 nt, 50 nt, 100 nt, 200 nt, 300 nt, 500 nt, 1000 nt, 2000 nt or even about 5000 nt or larger in length. Moreover, it is not required for the purpose of the invention that the nucleotide sequence of the used inhibitory GTR RNA molecule or the encoding region of the transgene, is completely identical or complementary to the endogenous GTR gene the expression of which is targeted to be reduced in the plant cell. The longer the sequence, the less stringent the requirement for the overall sequence identity is. Thus, the sense or antisense regions may have an overall sequence identity of about 40% or 50% or 60% or 70% or 80% or 90% or 100% to the nucleotide sequence of the endogenous GTR gene or the complement thereof. However, as mentioned, antisense or sense regions should comprise a nucleotide sequence of 20 consecutive nucleotides having about 95 to about 100% sequence identity to the nucleotide sequence of the endogenous GTR gene. The stretch of about 95 to about 100% sequence identity may be about 50, 75 or 100 nt.

[0247] The efficiency of the above mentioned chimeric genes for antisense RNA or sense RNA-mediated gene expression level down-regulation may be further enhanced by inclusion of DNA elements which result in the expression of aberrant, non-polyadenylated GTR inhibitory RNA molecules. One such DNA element suitable for that purpose is a DNA region encoding a self-splicing ribozyme, as described in WO 00/01133. The efficiency may also be enhanced by providing the generated RNA molecules with nuclear localization or retention signals as described in WO 03/076619.

[0248] In yet another embodiment, GTR gene expression may be down-regulated by introducing a chimeric DNA construct which yields a double-stranded RNA molecule capable of down-regulating GTR gene expression. Upon transcription of the DNA region the RNA is able to form dsRNA molecule through conventional base paring between a sense and antisense region, whereby the sense and antisense region are nucleotide sequences as hereinbefore described. dsRNA-encoding GTR expression-reducing chimeric genes according to the invention may further comprise an intron, such as a heterologous intron, located e.g. in the spacer sequence between the sense and antisense RNA regions in accordance with the disclosure of WO 99/53050 (incorporated herein by reference). To achieve the construction of such a transgene, use can be made of the vectors described in WO 02/059294 A1.

[0249] In still another embodiment, GTR gene expression is down-regulated by introducing a chimeric DNA construct which yields a pre-miRNA RNA molecule which is processed into a miRNA capable of guiding the cleavage of GTR mRNA. miRNAs are small endogenous RNAs that regulate gene expression in plants, but also in other eukaryotes. In plants, these about 21 nucleotide long RNAs are processed from the stem-loop regions of long endogenous pre-miRNAs by the cleavage activity of DICERLIKE1 (DCL1). Plant miRNAs are highly complementary to conserved target mRNAs, and guide the cleavage of their targets. miRNAs appear to be key components in regulating the gene expression of complex networks of pathways involved inter alia in development.

[0250] As used herein, a “miRNA” is an RNA molecule of about 20 to 22 nucleotides in length which can be loaded into a RISC complex and direct the cleavage of a target RNA molecule, wherein the target RNA molecule comprises a nucleotide sequence essentially complementary to the nucleotide sequence of the miRNA molecule whereby one or more of the following mismatches may occur:
[0251] A mismatch between the nucleotide at the 5′ end of said miRNA and the corresponding nucleotide sequence in the target RNA molecule;
[0252] A mismatch between any one of the nucleotides in position 1 to position 9 of said miRNA and the corresponding nucleotide sequence in the target RNA molecule;
[0253] Three mismatches between any one of the nucleotides in position 12 to position 21 of said miRNA and the corresponding nucleotide sequence in the target RNA molecule provided that there are no more than two consecutive mismatches.
   No mismatch is allowed at positions 10 and 11 of the miRNA (all miRNA positions are indicated starting from the 5′ end of the miRNA molecule).

[0254] As used herein, a “pre-miRNA” molecule is an RNA molecule of about 100 to about 200 nucleotides, preferably about 100 to about 130 nucleotides which can adopt a secondary structure comprising a dsRNA stem and a single stranded RNA loop and further comprising the nucleotide sequence of the miRNA and its complement sequence of the miRNA* in the double-stranded RNA stem. Preferably, the miRNA and its complement are located about 10 to about 20 nucleotides from the free ends of the miRNA dsRNA stem. The length and sequence of the single stranded loop region are not critical and may vary considerably, e.g. between 30 and 50 nt in length. Preferably, the difference in free energy between unpaired and paired RNA structure is between −20 and −60 kcal/mole, particularly around −40 kcal/mole. The complementarity between the miRNA and the miRNA* do not need to be perfect and about 1 to 3 bulges of unpaired nucleotides can be tolerated. The secondary structure adopted by an RNA molecule can be predicted by computer algorithms conventional in the art such as mFold, UNAFold and RNAFold. The particular strand of the dsRNA stem from the pre-miRNA which is released by DCL activity and loaded onto the RISC complex is determined by the degree of complementarity at the 5′ end, whereby the strand which at its 5′ end is the least involved in hydrogen bounding between the nucleotides of the different strands of the cleaved dsRNA stem is loaded onto the RISC complex and will determine the sequence specificity of the target RNA molecule degradation. However, if empirically the miRNA molecule from a particular synthetic pre-miRNA molecule is not functional because the “wrong” strand is loaded on the RISC complex, it will be immediately evident that this problem can be solved by exchanging the position of the miRNA molecule and its complement on the respective strands of the dsRNA stem of the pre-miRNA molecule. As is known in the art, binding between A and U involving two hydrogen bounds, or G and U involving two hydrogen bounds is less strong that between G and C involving three hydrogen bounds.

[0255] miRNA molecules may be comprised within their naturally occurring pre-miRNA molecules but they can also be introduced into existing pre-miRNA molecule scaffolds by exchanging the nucleotide sequence of the miRNA molecule normally processed from such existing pre-miRNA molecule for the nucleotide sequence of another miRNA of interest. The scaffold of the pre-miRNA can also be completely synthetic. Likewise, synthetic miRNA molecules may be comprised within, and processed from, existing pre-miRNA molecule scaffolds or synthetic pre-miRNA scaffolds.

[0256] In another embodiment of the invention, GTR protein activity may be down-regulated by introducing a chimeric DNA construct in the plant, plant tissue, plant organ, plant part, or plant cell, comprising the following operably linked DNA regions:
[0257] a) a promoter, operative in the plant, plant tissue, plant organ, plant part, or plant cell;
[0258] b) a DNA region which when transcribed yields a GTR-inhibitory RNA molecule capable of down-regulating GTR activity; and
[0259] c) a DNA region involved in transcription termination and polyadenylation.

[0260] In one aspect, the GTR-inhibitory RNA molecule capable of down-regulating endogenous GTR protein activity is an RNA molecule which can be translated into a biologically active protein capable of decreasing the levels of GTR activity. This can be achieved, e.g., inactivating antibodies to GTR proteins. “Inactivating antibodies to GTR proteins” are antibodies or parts thereof which specifically bind at least to some epitopes of GTR proteins, such as the substrate/proton binding domain or the conserved domains described above, or which trap the transport protein in a conformation that does not allow transport (as described e.g. in JBC 274(22): 15420-15426, 1999) and which inhibit the activity of the target protein.

[0261] The chimeric DNA construct used to reduce the functional GTR activity by down-regulation of GTR gene expression level and/or by down-regulation of GTR protein activity can be stably inserted in a conventional manner into the nuclear genome of a single plant cell, and the so-transformed plant cell can be used in a conventional manner to produce a transformed plant with modified GSL content. In this regard, a T-DNA vector, containing the chimeric DNA construct used to reduce the functional GTR activity, in Agrobacterium tumefaciens can be used to transform the plant cell, and thereafter, a transformed plant can be regenerated from the transformed plant cell using the procedures described, for example, in EP0116718, EP0270822, WO84/02913 and published European Patent application EP 0 242 246 and in Gould et al. (1991). The construction of a T-DNA vector for Agrobacterium mediated plant transformation is well known in the art. The T-DNA vector may be either a binary vector as described in EP0120561 and EP0120515 or a co-integrate vector which can integrate into the Agrobacterium Ti-plasmid by homologous recombination, as described in EP0116718. Preferred T-DNA vectors each contain a promoter operably linked to the transcribed DNA region between T-DNA border sequences, or at least located to the left of the right border sequence. Border sequences are described in Gielen et al. (1984). Introduction of the T-DNA vector into Agrobacterium can be carried out using known methods, such as electroporation or triparental mating. Of course, other types of vectors can be used to transform the plant cell, using procedures such as direct gene transfer (as described, for example in EP0223247), pollen mediated transformation (as described, for example in EP0270356 and WO85/01856), protoplast transformation as, for example, described in U.S. Pat. No. 4,684,611, plant RNA virus-mediated transformation (as described, for example in EP0067553 and U.S. Pat. No. 4,407,956), liposome-mediated transformation (as described, for example in U.S. Pat. No. 4,536,475), and other methods The resulting transformed plant can be used in a conventional plant breeding scheme to produce more transformed plants with modifying total GSL content.

[0262] In another embodiment of the invention, the functional activity of GTR may be reduced by modification of the nucleotide sequence of the endogenous GTR genes. In a preferred embodiment, the GTR gene expression-regulating sequences are altered so that the GTR gene expression levels are down-regulated.

[0263] Methods to achieve such a modification of endogenous GTR genes include homologous recombination to exchange the endogenous GTR genes for mutant GTR genes e.g. by the methods described in U.S. Pat. No. 5,527,695. In a preferred embodiment such site-directed modification of the nucleotide sequence of the endogenous GTR genes is achieved by introduction of chimeric DNA/RNA oligonucleotides as described in WO 96/22364 or U.S. Pat. No. 5,565,350.

[0264] Methods to achieve such a modification of endogenous GTR genes also include mutagenesis. It will be immediately clear to the skilled artisan, that mutant plant cells and plant lines, wherein the functional GTR activity is reduced may be used to the same effect as the transgenic plant cells and plant lines described herein. Mutants in GTR gene of a plant cell or plant may be easily identified using screening methods known in the art, whereby chemical mutagenesis, such as e.g., EMS mutagenesis, is combined with sensitive detection methods (such as e.g., denaturing HPLC). An example of such a technique is the so-called “Targeted Induced Local Lesions in Genomes” method as described in McCallum et al, Plant Physiology 123 439-442 or WO 01/75167. However, other methods to detect mutations in particular genome regions or even alleles, are also available and include screening of libraries of existing or newly generated insertion mutant plant lines, whereby pools of genomic DNA of these mutant plant lines are subjected to PCR amplification using primers specific for the inserted DNA fragment and primers specific for the genomic region or allele, wherein the insertion is expected (see e.g. Maes et al., 1999, Trends in Plant Science, 4, pp 90-96). Thus, methods are available in the art to identify plant cells and plant lines comprising a mutation in the GTR gene. This population of mutant cells or plant lines can then be tested for functional GTR activity and GSL content and compared to non-mutated cells or plant lines with similar genetic background.

[0265] Further provided are plants obtainable by the above described methods and parts and products thereof, including seed, seed meal, seed oil, green plant tissue, such as rosette leaves, cauline leaves en silique walls, and root tissue, as well as uses thereof, for example, in animal feed, in pest management, such as biofumigation, and in cancer-prevention.

[0266] According to a particular embodiment of the invention, the transformed or mutated plant cells and plants obtained by the methods of the invention may contain, respectively, at least one other or at least one chimeric gene containing a nucleic acid encoding a protein of interest. Examples of such proteins of interest include an enzyme for resistance to a herbicide, such as the bar or pat enzyme for tolerance to glufosinate-based herbicides (EP 0 257 542, WO 87/05629 and EP 0 257 542, White et al. 1990), the EPSPS enzyme for tolerance to glyphosate-based herbicides such as a double-mutant corn EPSPS enzyme (U.S. Pat. No. 6,566,587 and WO 97/04103), or the HPPD enzyme for tolerance to HPPD inhibitor herbicides such as isoxazoles (WO 96/38567).

[0267] The transformed or mutated plant cells and plants obtained by the methods of the invention may be further used in breeding procedures well known in the art, such as crossing, selfing, and backcrossing. Breeding programs may involve crossing to generate an F1 (first filial) generation, followed by several generations of selfing (generating F2, F3, etc.). The breeding program may also involve backcrossing (BC) steps, whereby the offspring is backcrossed to one of the parental lines, termed the recurrent parent.

[0268] The transformed or mutated plant cells and plants obtained by the methods of the invention may also be further used in subsequent transformation procedures.

[0269] The following non-limiting examples describe the characteristics of plants obtained in accordance with the invention. Unless otherwise stated, all recombinant DNA techniques are carried out according to standard protocols as described in Sambrook et al. (1989) Molecular Cloning: A Laboratory Manual, Second Edition, Cold Spring Harbour Laboratory Press, NY and in Volumes 1 and 2 of Ausubel et al. (1994) Current Protocols in Molecular Biology, Current Protocols, USA. Standard materials and methods for plant molecular work are described in Plant Molecular Biology Labfax (1993) by R. D. D. Croy published by BIOS Scientific Publications Ltd (UK) and Blackwell Scientific Publications, UK.

[0270] In the description and examples, reference is made to the following sequences:
[0271] SEQ ID NO: 1: Coding DNA (without introns) of the GTR1 gene encoding a wild-type GTR1 protein from Arabidopsis thaliana.
[0272] SEQ ID NO: 2: wild type GTR1 protein encoded by SEQ ID NO: 1.
[0273] SEQ ID NO: 3: Coding DNA (without introns) of the GTR2 gene encoding a wild-type GTR2 protein from Arabidopsis thaliana.
[0274] SEQ ID NO: 4: wild type GTR2 protein encoded by SEQ ID NO: 3.
[0275] SEQ ID NO: 5: Coding DNA (without introns) of the GTR3 gene encoding a wild-type GTR3 protein from Arabidopsis thaliana.
[0276] SEQ ID NO: 6: wild type GTR3 protein encoded by SEQ ID NO: 5.
[0277] SEQ ID NO: 7: Coding DNA (without introns) of the GTR4 gene encoding a wild-type GTR4 protein from Arabidopsis thaliana.
[0278] SEQ ID NO: 8: wild type GTR4 protein encoded by SEQ ID NO: 7.
[0279] SEQ ID NO: 9: Coding DNA (without introns) of the GTR5 gene encoding a wild-type GTR5 protein from Arabidopsis thaliana.
[0280] SEQ ID NO: 10: wild type GTR5 protein encoded by SEQ ID NO: 9.
[0281] SEQ ID NO: 11: Coding DNA (without introns) of the GTR6 gene encoding a wild-type GTR6 protein from Arabidopsis thaliana.
[0282] SEQ ID NO: 12: wild type GTR6 protein encoded by SEQ ID NO: 11.
[0283] SEQ ID NO: 13: Coding DNA (with introns) of the GTR1-A1 gene encoding a wild-type GTR1-A1 protein from Brassica napus.
[0284] SEQ ID NO: 14: wild type GTR1-A1 protein encoded by SEQ ID NO: 13.
[0285] SEQ ID NO: 15: Coding DNA (with introns) of the GTR1-A2 gene encoding a wild-type GTR1-A2 protein from Brassica napus.
[0286] SEQ ID NO: 16: wild type GTR1-A2 protein encoded by SEQ ID NO: 15.
[0287] SEQ ID NO: 17: Coding DNA (with introns) of the GTR1-A3 gene encoding a wild-type GTR1-A3 protein from Brassica napus.
[0288] SEQ ID NO: 18: wild type GTR1-A3 protein encoded by SEQ ID NO: 17.
[0289] SEQ ID NO: 19: Coding DNA (with introns) of the GTR1-C1 gene encoding a wild-type GTR1-C1 protein from Brassica napus.
[0290] SEQ ID NO: 20: wild type GTR1-C1 protein encoded by SEQ ID NO: 19.
[0291] SEQ ID NO: 21: Coding DNA (with introns) of the GTR1-C2 gene encoding a wild-type GTR1-C2 protein from Brassica napus.
[0292] SEQ ID NO: 22: wild type GTR1-C2 protein encoded by SEQ ID NO: 21.
[0293] SEQ ID NO: 23: Coding DNA (with introns) of the GTR1-C3 gene encoding a wild-type GTR1-C3 protein from Brassica napus.
[0294] SEQ ID NO: 24: wild type GTR1-C3 protein encoded by SEQ ID NO: 23.
[0295] SEQ ID NO: 25: Coding DNA (with introns) of the GTR2-A1 gene encoding a wild-type GTR2-A1 protein from Brassica napus.
[0296] SEQ ID NO: 26: wild type GTR2-A1 protein encoded by SEQ ID NO: 25.
[0297] SEQ ID NO: 27: Coding DNA (with introns) of the GTR2-A2 gene encoding a wild-type GTR2-A2 protein from Brassica napus.
[0298] SEQ ID NO: 28: wild type GTR2-A2 protein encoded by SEQ ID NO: 27.
[0299] SEQ ID NO: 29: Coding DNA (with introns) of the GTR2-A3 gene encoding a wild-type GTR2-A3 protein from Brassica napus.
[0300] SEQ ID NO: 30: wild type GTR2-A3 protein encoded by SEQ ID NO: 29.
[0301] SEQ ID NO: 31: Coding DNA (with introns) of the GTR2-C1 gene encoding a wild-type GTR2-C1 protein from Brassica napus.
[0302] SEQ ID NO: 32: wild type GTR2-C1 protein encoded by SEQ ID NO: 31.
[0303] SEQ ID NO: 33: Coding DNA (with introns) of the GTR2-C2 gene encoding a wild-type GTR2-C2 protein from Brassica napus (partial sequence).
[0304] SEQ ID NO: 34: wild type GTR2-C2 protein encoded by SEQ ID NO: 33 (partial sequence).
[0305] SEQ ID NO: 35: Coding DNA (with introns) of the GTR2-C3 gene encoding a wild-type GTR2-C3 protein from Brassica napus.
[0306] SEQ ID NO: 36: wild type GTR2-C3 protein encoded by SEQ ID NO: 35.
[0307] SEQ ID NO: 37: Coding DNA (with introns) of the GTR1-A1 gene encoding a wild-type GTR1-A1 protein from Brassica rapa.
[0308] SEQ ID NO: 38: wild type GTR1-A1 protein encoded by SEQ ID NO: 37.
[0309] SEQ ID NO: 39: Coding DNA (with introns) of the GTR1-A2 gene encoding a wild-type GTR1-A2 protein from Brassica rapa.
[0310] SEQ ID NO: 40: wild type GTR1-A2 protein encoded by SEQ ID NO: 39.
[0311] SEQ ID NO: 41: Coding DNA (with introns) of the GTR1-A3 gene encoding a wild-type GTR1-A3 protein from Brassica rapa.
[0312] SEQ ID NO: 42: wild type GTR1-A3 protein encoded by SEQ ID NO: 41.
[0313] SEQ ID NO: 43: Coding DNA (with introns) of the GTR2-A1 gene encoding a wild-type GTR2-A1 protein from Brassica rapa.
[0314] SEQ ID NO: 44: wild type GTR2-A1 protein encoded by SEQ ID NO: 43.
[0315] SEQ ID NO: 45: Coding DNA (with introns) of the GTR2-A2 gene encoding a wild-type GTR2-A2 protein from Brassica rapa.
[0316] SEQ ID NO: 46: wild type GTR2-A2 protein encoded by SEQ ID NO: 45.
[0317] SEQ ID NO: 47: Coding DNA (with introns) of the GTR2-A3 gene encoding a wild-type GTR2-A3 protein from Brassica rapa.
[0318] SEQ ID NO: 48: wild type GTR2-A3 protein encoded by SEQ ID NO: 47.
[0319] SEQ ID NO: 49: Coding DNA (with introns) of the GTR1-C1 gene encoding a wild-type GTR1-C1 protein from Brassica oleracea.
[0320] SEQ ID NO: 50: wild type GTR1-C1 protein encoded by SEQ ID NO: 49.
[0321] SEQ ID NO: 51: Coding DNA (with introns) of the GTR1-C2 gene encoding a wild-type GTR1-C2 protein from Brassica oleracea.
[0322] SEQ ID NO: 52: wild type GTR1-C2 protein encoded by SEQ ID NO: 51.
[0323] SEQ ID NO: 53: Coding DNA (with introns) of the GTR1-C3 gene encoding a wild-type GTR1-C3 protein from Brassica oleracea.
[0324] SEQ ID NO: 54: wild type GTR1-C3 protein encoded by SEQ ID NO: 53.
[0325] SEQ ID NO: 55: Coding DNA (with introns) of the GTR2-C1 gene encoding a wild-type GTR2-C1 protein from Brassica oleracea.
[0326] SEQ ID NO: 56: wild type GTR2-C1 protein encoded by SEQ ID NO: 55.
[0327] SEQ ID NO: 57: Coding DNA (with introns) of the GTR2-C2 gene encoding a wild-type GTR2-C2 protein from Brassica oleracea.
[0328] SEQ ID NO: 58: wild type GTR2-C2 protein encoded by SEQ ID NO: 57.
[0329] SEQ ID NO: 59: Coding DNA (with introns) of the GTR2-C3 gene encoding a wild-type GTR2-C3 protein from Brassica oleracea.
[0330] SEQ ID NO: 60: wild type GTR2-C3 protein encoded by SEQ ID NO: 59.
[0331] SEQ ID NO: 61: Coding DNA (with introns) of the GTR1 gene encoding a wild-type
[0332] GTR1 protein from Arabidopsis thaliana.
[0333] SEQ ID NO: 62: wild type GTR1 protein encoded by SEQ ID NO: 61.
[0334] SEQ ID NO: 63: Coding DNA (with introns) of the GTR2 gene encoding a wild-type
[0335] GTR2 protein from Arabidopsis thaliana.
[0336] SEQ ID NO: 64: wild type GTR2 protein encoded by SEQ ID NO: 63.
[0337] SEQ ID NO: 65: Coding DNA (with introns) of the GTR2-A2 gene encoding a wild-type GTR2-A2 protein from Brassica rapa ecotype pekinensis.
[0338] SEQ ID NO: 66: wild type GTR2-A2 protein encoded by SEQ ID NO: 65.
[0339] SEQ ID NO: 67: Primer BrGTR2-A2-f (uracil at position 8)
[0340] SEQ ID NO: 68: Primer BrGTR2-A2-r (uracil at position 8)
[0341] SEQ ID NO: 69: Primer BrGTR2-A2-Till-f
[0342] SEQ ID NO: 70: Primer BrGTR2-A2-Till-r
[0343] SEQ ID NO: 71: Primer BrGTR2-A2-Inner-fw
[0344] SEQ ID NO: 72: Primer BrGTR2-A2-Inner-fw2
[0345] SEQ ID NO: 73: Primer BrGTR2-A2-Inner-rv
[0346] SEQ ID NO: 74: Primer BrGTR2-A2-126-f (uracil at position 10)
[0347] SEQ ID NO: 75: Primer BrGTR2-A2-126-r (uracil at position 10)
[0348] SEQ ID NO: 76: Primer BrGTR2-A2-145-f (uracil at position 9)
[0349] SEQ ID NO: 77: Primer BrGTR2-A2-145-r (uracil at position 9)
[0350] SEQ ID NO: 78: Primer BrGTR2-A2-192-f (uracil at position 9)
[0351] SEQ ID NO: 79: Primer BrGTR2-A2-192-r (uracil at position 9)
[0352] SEQ ID NO: 80: Primer BrGTR2-A2-229-f (uracil at position 11)
[0353] SEQ ID NO: 81: Primer BrGTR2-A2-229-r (uracil at position 11)
[0354] SEQ ID NO: 82: Primer BrGTR2-A2-359-f (uracil at position 10)
[0355] SEQ ID NO: 83: Primer BrGTR2-A2-359-r (uracil at position 10)
[0356] SEQ ID NO: 84: Primer AtGTR2f (uracil at position 8)
[0357] SEQ ID NO: 85: Primer AtGTR2r (uracil at position 8)
[0358] SEQ ID NO: 86: Primer AtGTR4e1f (uracil at position 8)
[0359] SEQ ID NO: 87: Primer AtGTR4e1r (uracil at position 9)
[0360] SEQ ID NO: 88: Primer AtGTR4e2f (uracil at position 9)
[0361] SEQ ID NO: 89: Primer AtGTR4e2r (uracil at position 13)
[0362] SEQ ID NO: 90: Primer AtGTR4e3f (uracil at position 13)
[0363] SEQ ID NO: 91: Primer AtGTR4e3r (uracil at position 9)
[0364] SEQ ID NO: 92: Primer AtGTR4e4f (uracil at position 9)
[0365] SEQ ID NO: 93: Primer AtGTR4e4r (uracil at position 8)
[0366] SEQ ID NO: 94: Primer AtGTR5f (uracil at position 8)
[0367] SEQ ID NO: 95: Primer AtGTR5r (uracil at position 8)
[0368] SEQ ID NO: 96: Primer T7
[0369] SEQ ID NO: 97: Primer pNB1rev
[0370] SEQ ID NO: 98: Primer AtGTR1_N879742_RP
[0371] SEQ ID NO: 99: Primer AtGTR1_N879742_RP
[0372] SEQ ID NO: 100: Primer AtGTR1_N870210_RP
[0373] SEQ ID NO: 101: Primer AtGTR1_N870210_RP
[0374] SEQ ID NO: 102: Primer AtGTR1_N409421_RP
[0375] SEQ ID NO: 103: Primer AtGTR1_N409421_RP
[0376] SEQ ID NO: 104: Primer AtGTR1_RP_fw
[0377] SEQ ID NO: 105: Primer AtGTR1_RP_rev
[0378] SEQ ID NO: 106: Primer AtGTR2_RP_fw
[0379] SEQ ID NO: 107: Primer AtGTR2_RP_rev
[0380] SEQ ID NO: 108: Primer AtGTR3_RP_fw
[0381] SEQ ID NO: 109: Primer AtGTR3_RP_rev
[0382] SEQ ID NO: 110: Primer AtGTR1pf
[0383] SEQ ID NO: 111: Primer AtGTR1pr
[0384] SEQ ID NO: 112: Primer AtGTR2pf
[0385] SEQ ID NO: 113: Primer AtGTR2pr
[0386] SEQ ID NO: 114: Primer AtGTR1r-YFP
[0387] SEQ ID NO: 115: Primer YFPf-AtGTR1-fusion
[0388] SEQ ID NO: 116: Primer YFPr-AtGTR1-3′ utr-fusion
[0389] SEQ ID NO: 117: Primer AtGTR1(3′ utr)f-YFP fusion
[0390] SEQ ID NO: 118: Primer AtGTR1(3′ utr)r
[0391] SEQ ID NO: 119: Coding DNA (with introns) of the GTR2-A1 gene encoding a wild-type GTR2-A1 protein from Brassica juncea.
[0392] SEQ ID NO: 120: wild type GTR2-A1 protein encoded by SEQ ID NO: 119.
[0393] SEQ ID NO: 121: Coding DNA (with introns) of the GTR2-A2 gene encoding a wild-type GTR2-A2 protein from Brassica juncea.
[0394] SEQ ID NO: 122: wild type GTR2-A2 protein encoded by SEQ ID NO: 121.
[0395] SEQ ID NO: 123: Coding DNA (with introns) of the GTR2-A3 gene encoding a wild-type GTR2-A3 protein from Brassica juncea.
[0396] SEQ ID NO: 124: wild type GTR2-A3 protein encoded by SEQ ID NO: 123.
[0397] SEQ ID NO: 125: Coding DNA (with introns) of the GTR2-B1 gene encoding a wild-type GTR2-B1 protein from Brassica juncea (partial sequence from exon 2 on).
[0398] SEQ ID NO: 126: wild type GTR2-B1 protein encoded by SEQ ID NO: 125 (partial sequence).
[0399] SEQ ID NO: 127: Coding DNA (with introns) of the GTR2-B2 gene encoding a wild-type GTR2-B2 protein from Brassica juncea.
[0400] SEQ ID NO: 128: wild type GTR2-B2 protein encoded by SEQ ID NO: 127.
[0401] SEQ ID NO: 129: Coding DNA (with introns) of the GTR2-B3 gene encoding a wild-type GTR2-B3 protein from Brassica juncea.
[0402] SEQ ID NO: 130: wild type GTR2-B3 protein encoded by SEQ ID NO: 129.
[0403] SEQ ID NO: 131: Coding DNA (without introns) of the GTR2-A1 gene encoding a wild-type GTR2-C1 protein from Brassica juncea.
[0404] SEQ ID NO: 132: Coding DNA (without introns) of the GTR2-A2 gene encoding a wild-type GTR2-A2 protein from Brassica juncea.
[0405] SEQ ID NO: 133: Coding DNA (without introns) of the GTR2-A3 gene encoding a wild-type GTR2-A3 protein from Brassica juncea.
[0406] SEQ ID NO: 134: Coding DNA (without introns) of the GTR2-B1 gene encoding a wild-type GTR2-B1 protein from Brassica juncea.
[0407] SEQ ID NO: 135: Coding DNA (without introns) of the GTR2-B2 gene encoding a wild-type GTR2-B2 protein from Brassica juncea.
[0408] SEQ ID NO: 136: Coding DNA (without introns) of the GTR2-B3 gene encoding a wild-type GTR2-B3 protein from Brassica juncea.
[0409] SEQ ID NO: 137: Coding DNA (with introns) of the GTR1-C1 gene encoding a wild-type GTR1-C1 protein from Brassica napus (variant).
[0410] SEQ ID NO: 138: dsRNA construct for downregulation of the expression of GTR1 expression in Brassica napus.
[0411] SEQ ID NO: 139: dsRNA construct for downregulation of the expression of GTR2 expression in Brassica napus
[0412] SEQ ID NO: 140: dsRNA construct for downregulation of the expression of GTR1 and GTR2 expression in Brassica napus.
[0413] SEQ ID NO: 141: Coding DNA (without introns) of the GTR1 gene encoding a wild-type GTR1 protein from Arabidopsis thaliana including the 30 amino acids NH2-terminal extension
[0414] SEQ ID NO: 142: wild type GTR1 protein including 30 amino acids N-terminal extension encoded by SEQ ID NO: 141
[0415] SEQ ID NO: 143: Coding DNA (without introns) of the GTR1-A1 gene encoding a wild-type GTR1A1 protein from Brassica napus including the 23 amino acids NH2-terminal extension
[0416] SEQ ID NO: 144: wild type GTR1-A1 protein including 23 amino acids N-terminal extension encoded by SEQ ID NO: 143
[0417] SEQ ID NO: 145: Coding DNA (without introns) of the GTR1-C1 gene encoding a wild-type GTR1 protein from Brassica napus including the 23 amino acids NH2-terminal extension
[0418] SEQ ID NO: 146: wild type GTR1-C1 protein including 23 amino acids N-terminal extension encoded by SEQ ID NO: 145
[0419] SEQ ID NO: 147: Coding DNA (without introns) of the GTR1-A1 gene encoding a wild-type GTR1-A1 protein from Brassica rapa including the 23 amino acids NH2-terminal extension
[0420] SEQ ID NO: 148: wild type GTR1-A1 protein including 23 amino acids N-terminal extension encoded by SEQ ID NO: 147
[0421] SEQ ID NO: 149: Coding DNA (without introns) of the GTR1-C1 gene encoding a wild-type GTR1-C1 protein from Brassica oleracea including the 23 amino acids NH2-terminal extension.
[0422] SEQ ID NO: 150: wild type GTR1-C1 protein including 23 amino acids N-terminal extension encoded by SEQ ID NO: 149.

[0423] Unless stated otherwise in the Examples, all recombinant DNA techniques are carried out according to standard molecular biological techniques as described in Sambrook and Russell (2001) Molecular Cloning: A Laboratory Manual, Third Edition, Cold Spring Harbor Laboratory Press, NY, in Volumes 1 and 2 of Ausubel et al. (1994) Current Protocols in Molecular Biology, Current Protocols, USA and in Volumes I and II of Brown (1998) Molecular Biology LabFax, Second Edition, Academic Press (UK). Standard materials and methods for plant molecular work are described in Plant Molecular Biology Labfax (1993) by R. D. D. Croy, jointly published by BIOS Scientific Publications Ltd (UK) and Blackwell Scientific Publications, UK. Standard materials and methods for polymerase chain reactions can be found in Dieffenbach and Dveksler (1995) PCR Primer: A Laboratory Manual, Cold Spring Harbor Laboratory Press, and in McPherson at al. (2000) PCR—Basics: From Background to Bench, First Edition, Springer Verlag, Germany.

### EXAMPLES

[0424] Any methods of the invention not specifically described below may be performed by one of ordinary skill in the art without undue burden in the light of the disclosure herein.

### Example 1

### Identification and Characterization of GTR Proteins

[0425] Identification and Characterization of Arabidopsis GTR Sequences

[0426] A library of Arabidopsis transporters available as full length cDNAs from the RIKEN bioresource center (Ibaraki, Japan) was functionally screened in pools of ten genes for uptake of the most abundant Arabidopsis GSL 4-methylthiobutyl glucosinolate (4-MTB) into Xenopus oocytes. The constructed library consists of 239 transporters categorized as “organic solute transporters” or as “unknown function” with 10-14 transmembrane segments in the Arabidopsis membrane protein library database (Nour-Eldin et al., 2006, Plant Methods 2 : 17). As intended transport protein target in this study were potential importers from the apoplast, Xenopus oocytes uptake assays were performed in an acidic buffer (pH 5). Following this procedure At3g47960 (named herein AtGTR1; SEQ ID NO: 1, 2, 61 and 62) and At1g18880 (named herein AtGTR3; SEQ ID NO: 5 and 6) were identified as GSL transporters (Nour-Eldin, 2007, supra).

[0427] At3g47960 and At1g18880 belong to the NRT/PTR transporter family (Steiner et al., 1995, Molecular Microbiology 16: 825-834; Tsay et al., 2007, FEBS letters 581: 2290-2300), which has been shown to consist of nitrate, nitrite and peptide transporters (Tsay et al., 2007, FEBS letters 581: 2290-2300; Segonzac et al., 2007, Plant Cell 19 : 3760-3777; Komarova et al., 2008, Plant Physiol 148: 856-869). Phylogenetic analysis showed that these two genes form a small subclade with six homologs (see FIG. 1a): At3g47960 (named herein AtGTR1; SEQ ID NO: 1, 2, 61 and 62), At5g62680 (named herein AtGTR2; SEQ ID NO: 3, 4, 63 and 64), At1g18880 (named herein AtGTR3; SEQ ID NO: 5 and 6), At1g69860 (named herein AtGTR4; SEQ ID NO: 7 and 8), At1g69870 (named herein AtGTR5 or NRT1.7; SEQ ID NO: 9 and 10), At1g27080 (named herein AtGTR6 or NRT1.6; SEQ ID NO: 11 and 12). FIG. 1b and Table 4 indicate the sequence identity between the different AtGTR sequences.

TABLE 4
Sequence identity (in %) between Arabidopsis GTR1(without the 30 N-terminal AA i.e. as represented
in SEQ ID No 2), 2, 3, 4, 5 and 6 amino acid sequences/nucleic acid (coding sequences without
introns) sequences (the respective SEQ ID NO: numbers are indicated between brackets)

| | AtGTR1 | AtGTR2 | AtGTR3 | AtGTR4 | AtGTR5 | AtGTR6 |
|---|---|---|---|---|---|---|
| | (SEQ ID 2/1) | (SEQ ID 4/3) | (SEQ ID 6/5) | (SEQ ID 8/7) | (SEQ ID 10/9) | (SEQ ID 12/11) |
| AtGTR1 (2/1) | 100/100 | 78/75 | 60/62 | 34/46 | 42/50 | 38/49 |
| AtGTR2 (4/3) | | 100/100 | 60/63 | 33/46 | 43/50 | 37/49 |
| AtGTR3 (6/5) | | | 100/100 | 35/48 | 39/48 | 37/50 |
| AtGTR4 (8/7) | | | | 100/100 | 41/53 | 41/54 |
| AtGTR5 (10/9) | | | | | 100/100 | 63/67 |
| AtGTR6 (12/11) | | | | | | 100/100 |

[0428] Identification and Characterization of Brassica spp. GTR Sequences

[0429] Brassica napus, Brassica rapa, and Brassica oleracea GTR1 and GTR2 nucleic and amino acid sequences were identified in silico by screening genomic databases for sequences essentially similar to the Arabidopsis GTR1 and GTR2 sequences identified above. The Brassica GTR1 sequences were named GTR1-(A/C)1, 2 and 3 (see sequence listing SEQ ID NO: 13-24, SEQ ID NO: 37-42, SEQ ID NO: 49-54 and SEQ ID NO: 61-62) according to their decreasing similarity to the Arabidopsis GTR1 homolog (Table 5a and b). Similarly, the Brassica GTR2 sequences were named GTR2-(A/C)1, 2 and 3 (see sequence listing SEQ ID NO: 25-36, SEQ ID NO: 43-48, SEQ ID NO: 55-60 and SEQ ID NO: 63-66) according to their decreasing similarity to the Arabidopsis GTR2 homolog (Table 6a and b). B. juncea nucleotide and amino acid sequences are provided in SEQ ID NOs: 119-136.

TABLE 5a
Sequence identity (in %) between Arabidopsis (At), Brassica rapa (Br),
Brassica oleracea (Bo), Brassica napus (Bn) GTR1 amino acid sequences (as
determined by ClustalW - the SEQ ID NO: numbers are indicated between brackets) (using
the short GTR1 of Arabidopsis thaliana as represented in SEQ ID No. 2)

| | At | Br | Br | Br | Bo | Bo | Bo | Bn | Bn | Bn | Bn | Bn | Bn |
|---|---|---|---|---|---|---|---|---|---|---|---|---|---|
| | (2) | (38) | (40) | (42) | (50) | (52) | (54) | (14) | (16) | (18) | (20) | (22) | (24) |
| At (2) | 100 | 84 | 83 | 81 | 83 | 83 | 81 | 83 | 83 | 81 | 83 | 83 | 81 |
| Br (38) | | 100 | 89 | 83 | 99 | 88 | 83 | 98 | 89 | 84 | 98 | 88 | 83 |
| Br (40) | | | 100 | 84 | 88 | 99 | 84 | 88 | 100 | 85 | 88 | 99 | 84 |
| Br (42) | | | | 100 | 83 | 84 | 97 | 83 | 84 | 99 | 83 | 84 | 97 |
| Bo (50) | | | | | 100 | 88 | 83 | 98 | 88 | 83 | 99 | 88 | 83 |
| Bo (52) | | | | | | 100 | 83 | 88 | 99 | 84 | 88 | 100 | 84 |
| Bo (54) | | | | | | | 100 | 83 | 84 | 97 | 83 | 83 | 99 |
| Bn (14) | | | | | | | | 100 | 88 | 83 | 98 | 88 | 83 |
| Bn (16) | | | | | | | | | 100 | 85 | 88 | 99 | 84 |
| Bn (18) | | | | | | | | | | 100 | 83 | 84 | 98 |
| Bn (20) | | | | | | | | | | | 100 | 88 | 83 |
| Bn (22) | | | | | | | | | | | | 100 | 84 |
| Bn (24) | | | | | | | | | | | | | 100 |

TABLE 5b
Sequence identity (in %) between Arabidopsis (At), Brassica rapa (Br), Brassica oleracea
(Bo), Brassica napus (Bn) GTR1 nucleic acid (coding -without introns) sequences (as
determined by ClustalW - the SEQ ID NO: numbers are indicated between brackets) (using the
short GTR1 of Arabidopsis thaliana as represented in SEQ ID No. 1)

| | At | Br | Br | Br | Bo | Bo | Bo | Bn | Bn | Bn | Bn | Bn | Bn |
|---|---|---|---|---|---|---|---|---|---|---|---|---|---|
| | (1) | (37) | (39) | (41) | (49) | (51) | (53) | (13) | (15) | (17) | (19) | (21) | (23) |
| At (1) | 100 | 84 | 83 | 83 | 84 | 83 | 83 | 84 | 84 | 83 | 84 | 83 | 83 |
| Br (37) | | 100 | 88 | 87 | 98 | 89 | 87 | 98 | 88 | 87 | 98 | 89 | 87 |
| Br (39) | | | 100 | 86 | 88 | 98 | 86 | 88 | 99 | 86 | 88 | 98 | 86 |
| Br (41) | | | | 100 | 87 | 86 | 97 | 86 | 86 | 99 | 86 | 86 | 98 |
| Bo (49) | | | | | 100 | 88 | 87 | 98 | 88 | 87 | 99 | 88 | 87 |
| Bo (51) | | | | | | 100 | 86 | 88 | 98 | 86 | 88 | 100 | 86 |
| Bo (53) | | | | | | | 100 | 86 | 86 | 98 | 87 | 86 | 99 |
| Bn (13) | | | | | | | | 100 | 88 | 86 | 98 | 88 | 86 |
| Bn (15) | | | | | | | | | 100 | 86 | 88 | 98 | 86 |
| Bn (17) | | | | | | | | | | 100 | 87 | 86 | 98 |
| Bn (19) | | | | | | | | | | | 100 | 88 | 86 |
| Bn (21) | | | | | | | | | | | | 100 | 86 |
| Bn (23) | | | | | | | | | | | | | 100 |

TABLE 6a
Sequence identity (in %) between Arabidopsis (At), Brassica rapa (Br),
Brassica oleracea (Bo), Brassica napus (Bn) GTR2 amino acid sequences (as
determined by ClustalW - the SEQ ID NO: numbers are indicated between brackets)

| | At | Br | Br | Br | Bo | Bo | Bo | Bn | Bn | Bn | Bn | Bn |
|---|---|---|---|---|---|---|---|---|---|---|---|---|
| | (4) | (44) | (46) | (48) | (56) | (58) | (60) | (26) | (28) | (30) | (32) | (36) |
| At (4) | 100 | 91 | 91 | 83 | 91 | 91 | 82 | 91 | 91 | 84 | 91 | 84 |
| Br (44) | | 100 | 94 | 85 | 99 | 94 | 84 | 99 | 94 | 87 | 99 | 86 |
| Br (46) | | | 100 | 86 | 94 | 99 | 85 | 94 | 99 | 88 | 94 | 87 |
| Br (48) | | | | 100 | 86 | 86 | 95 | 86 | 86 | 97 | 86 | 95 |
| Bo (56) | | | | | 100 | 94 | 85 | 99 | 94 | 87 | 100 | 87 |
| Bo (58) | | | | | | 100 | 85 | 94 | 99 | 88 | 94 | 87 |
| Bo (60) | | | | | | | 100 | 85 | 85 | 94 | 85 | 95 |
| Bn (26) | | | | | | | | 100 | 94 | 87 | 99 | 87 |
| Bn (28) | | | | | | | | | 100 | 88 | 94 | 87 |
| Bn (30) | | | | | | | | | | 100 | 87 | 97 |
| Bn (32) | | | | | | | | | | | 100 | 87 |
| Bn (36) | | | | | | | | | | | | 100 |

TABLE 6b
Sequence identity (in %) between Arabidopsis (At), Brassica rapa (Br), Brassica oleracea
(Bo), Brassica napus (Bn) GTR2 nucleic acid (coding -without introns) sequences (as
determined by ClustalW - the SEQ ID NO: numbers are indicated between brackets)

| | At | Br | Br | Br | Bo | Bo | Bo | Bn | Bn | Bn | Bn | Bn |
|---|---|---|---|---|---|---|---|---|---|---|---|---|
| | (3) | (43) | (45) | (47) | (55) | (57) | (59) | (25) | (27) | (29) | (31) | (35) |
| At (3) | 100 | 87 | 87 | 83 | 87 | 86 | 82 | 87 | 87 | 84 | 87 | 85 |
| Br (43) | | 100 | 89 | 86 | 98 | 89 | 85 | 98 | 89 | 88 | 97 | 88 |
| Br (45) | | | 100 | 86 | 89 | 97 | 86 | 89 | 98 | 87 | 89 | 88 |
| Br (47) | | | | 100 | 86 | 86 | 96 | 86 | 86 | 97 | 86 | 96 |
| Bo (55) | | | | | 100 | 89 | 85 | 98 | 89 | 88 | 98 | 88 |
| Bo (57) | | | | | | 100 | 86 | 89 | 97 | 87 | 90 | 88 |
| Bo (59) | | | | | | | 100 | 85 | 85 | 95 | 85 | 96 |
| Bn (25) | | | | | | | | 100 | 89 | 88 | 97 | 88 |
| Bn (27) | | | | | | | | | 100 | 87 | 89 | 88 |
| Bn (29) | | | | | | | | | | 100 | 88 | 97 |
| Bn (31) | | | | | | | | | | | 100 | 88 |
| Bn (35) | | | | | | | | | | | | 100 |

[0430] In addition, type 1 and 2 sequences of the GTR1 and GTR2 sequences (i.e. GTR1-A1, GTR1-C1, GTR1-A2, GTR1-C2, GTR2-A1, GTR2-C1, GTR2-A2 and GTR2-C2 sequences) were identified in a B. napus embryo transcriptome database indicating that these types of GTR1 and 2 sequences are expressed in B. napus embryo's.

[0431] Further, Brassica rapa GTR2-A2 nucleic and amino acid sequences (SEQ ID NO: 65 and 66 in the sequence listing) were identified by cloning cDNA isolated from B. rapa ecotype pekinensis leaves using primers BrGTR2-A2-f (SEQ ID NO: 67) and BrGTR2-A2-r (SEQ ID NO: 68).

### Example 2

### Functional Characterization of GTR Proteins

[0432] Functional Characterization of Arabidopsis and Brassica GTR Proteins

[0433] AtGTR1 to 5, BrGTR2-A2 and 12 other members from the Arabidopsis NRT/PTR family were tested individually for uptake activity of 4-MTB in Xenopus oocytes.

[0434] AtGTR1 and 2 exhibited 5-fold higher uptake activity to AtGTR3 whereas AtGTR4 and AtGTR5 showed 10% 4-MTB uptake activity compared to AtGTR1. Uptake activity of all other tested NRT/PTRs was indistinguishable from uninjected oocytes.

[0435] Oocytes expressing BrGTR2-A2 imported about 2.5 nmol 4-MTB per hour per oocyte (FIG. 2) while non-injected oocytes showed no detectable uptake of 4-MTB. In comparison, oocytes expressing AtGTR2 imported about 5 nmol 4-MTB/hour (FIG. 3A).

[0436] Biochemical Characterization of Arabidopsis Glucosinolate Transporter Proteins

[0437] AtGTR1 and AtGTR2, which showed the highest GSL uptake activity, were biochemically characterized in Xenopus oocytes. For both genes, lowering pH from 6 to 5 in the uptake medium resulted in an about 8-fold higher 4-MTB accumulation inside oocytes while uptake at pH 7 was indistinguishable from uninjected oocytes at pH 5 (FIG. 3A). This indicated that AtGTRs are proton:GSL symporters.

[0438] When current recordings were performed on oocytes expressing, respectively, AtGTR1 and AtGTR2 exposed to 100 μM 4-MTB at pH 5 and voltage clamped at −50 mV elicited inward currents in the 30 nA range. This indicates a net influx of positive ions through the AtGTRs upon exposure to GSLs. GSL-induced inward currents were voltage dependent increasing with hyperpolarizing membrane potential within the range of +30 to −120 mV (FIGS. 3B and F). As GSLs carry one negative charge per molecule the stochiometry of protons to GSLs must be at least 2:1, which appears to be a typical characteristic of proton-dependent oligopeptide transporter proteins (POTs) in general when transporting negatively charged substrates (Daniel et al., 2006, Physiology 21 : 93-102). At pH 5 clamped at −60 mV, import of 4-MTB by AtGTR1 and 2, respectively, followed Michaelis-Menten saturation kinetics displaying high affinity of AtGTR1 and ATGTR2 towards 4-MTB with Kₘ=20±1.2 μM and Kₘ=18.7±4.2 μM (FIG. 3C-D). This suggests that GSLs are likely to be physiological substrates of AtGTRs in planta. Remarkably, substrate dependent transport rates for AtGTR2 at 500 μM 4-MTB were 25% lower than at 250 μM and 1 mM. This observation was also noticeable in substrate dependent transport rates measured by direct LC-MS detection of GSL uptake.

[0439] The substrate specificity of the AtGTRs was investigated towards GSLs with varying sidechains. When AtGTR1 expressing oocytes clamped at −50 mV at pH 5 were perfused with 100 μM of the endogenous short chain methionine derived GSLs 4-MTB, 4-methylsulfinylbutyl-GSL and the exogenous phenylalanine derived p-hydroxybenzyl-GSL (pOHBG), an inward current in the magnitude of 30, 10 and nA for AtGTR1 was observed (FIG. 3F). Similarly AtGTR2 took up all three glucosinolates measured by LC-MS analysis of oocyte extracts (data not shown). This indicated that the transporters have broad specificity with respect to the GSL side-chain.

[0440] The substrate specificity investigations were extended to include substrates previously identified for the NRT/PTR transporter family namely di- and tripeptides and nitrate. Perfusing oocytes expressing AtGTR1 with 133 μM of the dipeptides, ala-his, gly-leu, asp-ala and the tripeptides gly-gly-gly and met-ala-ser at pH 5 did not result in any detectable currents. However, perfusing with 1 mM NO₃⁻ did result in currents but these amounted only to 1/10^{th} of currents measured when perfusing with 100 μM 4-MTB (FIG. 3F). This indicated that the AtGTRs possibly possess dual substrate specificities. To investigate this further, AtGTR1 and AtGTR2 expressing oocytes were exposed to 40 μM C¹⁴-labeled pOHBG in the presence of 50× excess unlabeled 4-MTB, NO₃⁻, and a mixture of di/tri peptides. Only 50× excess of 4-MTB reduced the uptake of pOHBG to background levels, while the other compounds did not have significant inhibitory effects (FIG. 3E).

[0441] Collectively, our biochemical analyses showed that AtGTR1 and AtGTR2 are high affinity, specific, electrogenic proton-driven GSL transporters with broad specificity towards a wide range of GSLs.

### Materials and Methods

### Example 2

[0442] Functional Screening of Transporter cDNA Library in Xenopus Oocytes:

[0443] Preparation and functional screening of a library of 239 Arabidopsis transporters in Xenopus oocytes was performed essentially as described in Nour-Eldin et al. (2006, Plant Methods 2 : 17) with two modifications. Firstly, DNA templates were not pooled prior to in vitro transcription. Instead, each PCR product was individually in vitro transcribed and then pooled into ten transcripts per pool. Individual transcription was performed to avoid unbalanced gene pools due to possible varying transcription efficiencies of pooled PCR fragments. Secondly, the library was divided into 23 pools containing 10 transcripts each, and a 24th pool containing 9 transcripts. Import assays were performed at room temperature in Kulori pH 5 containing 1 mM 4-MTB (for Arabidopsis sequences) or 0.5 mM 4-MTB (for Brassica sequences). Transcript pools which mediated GSL uptake into injected oocytes were subsequently injected as individual transcripts to identify GSL transporter.

[0444] Constructs for Expression in Xenopus Oocytes:

[0445] Coding sequences for AtGTR2 and AtGTR5 were cloned from cDNA from leaf tissue using primer pair AtGTR2f (SEQ ID NO: 84) and AtGTR2r (SEQ ID NO: 85) and primer pair AtGTR5f (SEQ ID NO: 94) and AtGTR5r (SEQ ID NO: 95), respectively (Nour-Eldin et al., 2006, Nucl Acids Res 34: e122). AtGTR4 was cloned by PCR amplification using primer pair AtGTR4e1f and AtGTR4e1r (SEQ ID NO: 86 and 87) for the first exon, primer pair AtGTR4e2f and AtGTR4e2r (SEQ ID NO: 88 and 89) for the second exon, primer pair AtGTR4e3f and AtGTR4e3r (SEQ ID NO: 90 and 91) for the third exon and primer pair AtGTR4e4f and AtGTR4e4r (SEQ ID NO: 92 and 93) for the fourth exon, and subsequent fusion of its four exons from genomic DNA. USER fusion and cloning into pNB1u were performed as described previously (Geu-Flores et al., 2007, Nucl Acids Res 35:e55).

[0446] Coding sequence for BrGTR2-A2 (SEQ ID NO: 65) was cloned from cDNA isolated from B. rapa ecotype pekinensis leaves. The CDS was cloned using primers BrGTR2-A2-f (SEQ ID NO: 67) and BrGTR2-A2-r (SEQ ID NO: 68) and USER cloned into the Xenopus expression vector pNB1u (Nour-Eldin et al., 2006, Nucl Acids Res 34: e122).

[0447] Linear templates for in vitro transcription were generated by PCR using primers T7 (SEQ ID NO: 96) and pNB1 rev (SEQ ID NO: 97). cRNA was In vitro transcribed as follows in 50 μl reaction volumes: 1-5 μg linear template was incubated at 37° C. in T7 RNA polymerase transcription buffer containing 80 U T7 RNA polymerase (Fermentas); 0.01 M DTT; 0.1 μg/μl BSA; 60 μM 3′-0-Me-m⁷G(5′)ppp(5′)G RNA Cap Structure Analog (New England Biolabs); 20 U Ribolock™ RNase inhibitor (Fermentas); 0.01 U pyrophosphatase (Fermentas); 1 mM rATP, rUTP, rCTP and 0.05 mM rGTP (LAROVA) for 30 min. rGTP was then added to a final concentration of 1 mM, and the reaction was incubated for 3 hours. RNA was purified by lithium chloride precipitation and dissolved in nuclease free H₂O to a final concentration of 0.5 μg/μl.

[0448] GSL Transport Assays in Xenopus Oocytes:

[0449] Oocyte Treatment and Injection:

[0450] Oocytes were prepared as described previously (1998, Methods Enzymol. 296: 17-52), and injected with 50 ng cRNA. Oocytes were incubated for 3-4 days at 17° C., before assaying for transport activity.

[0451] Assay Conditions:

[0452] Assays were performed in saline buffer kulori (90 mM NaCl, 1 mM KCl, 1 mM CaCl₂, 1 mM MgCl₂, 5 mM MES) adjusted to pH 5 with TRIS. Oocytes were pre-incubated in kulori buffer pH 5 for 5 min to ensure intracellular steady state pH, and subsequently transferred to 500 μl kulori pH 5 buffer containing indicated concentrations of substrates and incubated for 1 hour at room temperature. Oocytes were washed four times in ice cold kulori pH 5 buffer.

[0453] Transport Quantification:

[0454] For assays with radiolabeled substrates, single oocytes were ruptured in 100 μl 10% SDS in 4 ml scintillation vials by shaking for 20-30 minutes. 2.5 ml EcoScint™ scintillation fluid (National Diagnostics) was added, and imported compounds quantified by scintillation counting. For assays with unlabeled substrates, oocyte extracts were analysed by LC-MS. Oocytes were analyzed in batches of 5 oocytes per repetition. Washed oocytes were homogenized in 100 μl kulori pH 5 containing 1 mg/ml sulphatase (Sigma A-25-120) and left for 12 hours at room temperature. An equal volume of 100% methanol was then added and samples incubated at −20° C. for one hour and centrifuged for 15 min at 20000 g. Three μl supernatant containing the desulfated-glucosinolate was analyzed by analytical LC-MS using an Agilent 1100 Series LC (Agilent Technologies, Germany) coupled to a Bruker HCT-Ultra ion trap mass spectrometer (Bruker Daltonics, Bremen, Germany). A Zorbax SB-C18 column (Agilent; 1.8 mm, 2.1 mm×50 mm) was used at a flow rate of 0.2 ml/min, and the oven temperature was maintained at 35° C. The mobile phases were: A, water with 0.1% (v/v) HCOOH and 50 μM NaCl; B, acetonitrile with 0.1% (v/v) HCOOH. The gradient program was: 0 to 0.5 min, isocratic 2% B; 0.5 to 7.5 min, linear gradient 2 to 40% B; 7.5 to 8.5 min, linear gradient 40% to 90% B; 8.5 to 11.5 min isocratic 90% B; 11.6 to 15 min, isocratic 2% B. The flow rate was increased to 0.3 ml/min in the interval 11.2 to 13.5 min. The mass spectrometer was run in positive electrospray mode.

### Example 3

### Generation and Characterization of Plants and Plant Parts with Mutant GTR Genes

[0455] Generation and Characterization of Plants with Mutant GTR Genes

[0456] Arabidopsis T-DNA mutants of AtGTR1 (atgtr1-1), AtGTR2 (atgtr2-1) and AtGTR3 (atgtr3-1), respectively, were identified from the SALK T-DNA collection (Alonso et al., 2003, Science 301: 653-657). In silico genomic sequence analysis, showed that atgtr1-1 contains a T-DNA insertion in the first exon while atgtr2-1 contains a T-DNA insertion in the fourth exon of the coding regions and atgtr3-1 contains the T-DNA insertion in the third exon. Genotyping [using primer pair AtGTR1_N879742_RP (SEQ ID NO: 98) and AtGTR1_N879742_LP (SEQ ID NO: 99) for atgtr1, AtGTR2_N870210_RP (SEQ ID NO: 100) and AtGTR2_N870210_LP (SEQ ID NO: 101) for atgtr2; and AtGTR3_N409421_RP (SEQ ID NO: 102) and AtGTR3_N409421_LP (SEQ ID NO: 103) for atgtr3] and RT-PCR analysis [using primer pair AtGTR1_RT_fw (SEQ ID NO: 104) and AtGTR1_RT_rev (SEQ ID NO: 105) for AtGTR1, AtGTR2_RT_fw (SEQ ID NO: 106) and AtGTR2_RT_rev (SEQ ID NO: 107) for AtGTR2 and AtGTR3_RT_fw (SEQ ID NO: 108) and AtGTR3_RT_rev (SEQ ID NO: 109) for AtGTR3] showed that atgtr1, atgtr2 and atgtr3 homozygous mutants were null mutants for their respective AtGTR. A double knockout mutant was generated by crossing atgtr1 mutant plants to atgtr2 mutant plants. From the segregating F2 population, 3 homozygous lines were identified for each of the wild type, atgtr1, atgtr2 and atgtr1/atgtr2 genotypes.

[0457] Brassica rapa substitution mutants of BrGTR2-A2 were identified in a mutated B. rapa ecotype R-0-18 plant population (RevGenUK) by TILLING using the BrGTR2-A2 sequence of SEQ ID NO: 65 and tilling primers BrGTR2-A2-Till-f (SEQ ID NO: 69), BrGTR2-A2-Till-r (SEQ ID NO: 70), BrGTR2-A2-Inner-fw (SEQ ID NO: 71), BrGTR2-A2-Inner-fw2 (SEQ ID NO: 72), and BrGTR2-A2-Inner-rv (SEQ ID NO: 73). Twenty substitution mutations were found: 7 silent mutations (nucleic acid mutation resulting in codon encoding the same amino acid), 8 non-severe mutations (nucleic acid mutation resulting in codon encoding an amino acid belonging to the same functional class), 4 severe mutations (nucleic acid mutation resulting in codon encoding an amino acid belonging to a different functional class, e.g. small for large, nonpolar for polar, aliphatic for nonaliphatic, aromatic for nonaromatic, hydrophobic for polar, acidic side chain for nonacidic side chain) and 1 stop codon mutation. The nucleotide position of severe and STOP mutant codons found in the genomic DNA sequence of BrGTR2-A2 from B. rapa ecotype R-0-18 are indicated in Table 7 as well as the corresponding amino acid position in SEQ ID NO: 66. Codons encoding the indicated amino acids in BrGTR2-A2 from B. rapa ecotype pekinensis can be found at the indicated amino acid positions in SEQ ID NO: 65. Homozygous wildtype and mutants B. rapa plants were identified for each mutation using primers BrGTR2-A2-Inner-fw (SEQ ID NO: 71), BrGTR2-A2-Inner-fw2 (SEQ ID NO: 72), and BrGTR2-A2-Inner-rv (SEQ ID NO: 73) and sequencing of the obtained amplicons to determine the presence of a wildtype or mutant codon at the positions indicated in Table 7. Mutant plants are grown and GSL content is determined in different plant parts.

[0458] Mutant plants are grown and GSL content is determined in different plant parts. The results are summarized in FIG. 9. Seeds from Brgtr2 knockout mutants (BrGTR2 (W229X Mut1-9)) have reduced glucosinolate content, both compared to “true” WT B. rapa seeds as well as to BrGTR2 S(W229X) WTS. The reduction is ˜80% compared to BrGTR2 (W229X-WT) plants, when pooling seeds of each genotype. B. rapa plants containing BrGTR2 mutated in amino acid G145R (G145R Mut1-4) show highly variable glucosinolate content, which is probably caused by segregation of additional EMS-induced point mutations in genes affecting seed glucosinolate content.

TABLE 7
Substitution and STOP codon mutations in BrGTR2-A2 from B. rapa
ecotype R-0-18

| SEQ ID | | | | | |
|---|---|---|---|---|---|
| NO: of | | | | Amino acid | uptake |
| used | | | | position in | activity |
| tilling | Nucleotide | WT->mutant | WT->mutant | SEQ ID | in % |
| primers: | position | codon | amino acid | NO: 66 | of WT |
| 69 + 73 | 833 | AGG->AGA | Gly->Arg | 126 | 5% |
| 69 + 73 | 890 | GGA->AGA | Gly->Arg | 145 | 85% |
| 71 + 73 | 1031 | GAG->AAG | Glu->Lys | 192 | 56% |
| 71 + 73 | 1143 | TTG->TAG | Trp->STOP | 229 | 0% |
| 72 + 73 | 1608 | TCC->TTC | Ser->Phe | 359 | 143% |

[0459] Functional Characterization of Mutant Brassica rapa GTR2-A2 Proteins

[0460] The identified mutant BrGTR2-A2 proteins were tested individually for uptake activity of 4-MTB in Xenopus oocytes. Point mutations were made in BrGTR2-A2 by USER fusion as described previously (Geu-Flores et al., 2007, Nucl Acids Res 35:e55). Briefly, the coding sequence is PCR amplified as two fragments flanking the desired mutation location. Each fragment has complementary tails with the base substitution embedded. In addition each tail contains a uracil residue which upon cleavage with the uracil specific excision reagent (USER) yields a long single stranded overhang which readily and firmly anneals with the complementary tail from the other fragment. At the distal terminal of each fragment the BrGTR2-A2-f primer was used as the forward primer for the fragment lying upstream of the mutation and the BrGTR2-A2-r as the reverse primer for the fragment lying downstream of the mutation. Primers used at the junction are given in SEQ ID NO: 74 and 75 (forward and reverse primer for amino acid 126 substitution as indicated in Table 7), in SEQ ID NO: 76 and 77 (forward and reverse primer for amino acid 145 substitution as indicated in Table 7), in SEQ ID NO: 78 and 79 (forward and reverse primer for amino acid 192 substitution as indicated in Table 7), in SEQ ID NO: 80 and 81 (forward and reverse primer for amino acid 229 substitution as indicated in Table 7) and in SEQ ID NO: 82 and 83 (forward and reverse primer for amino acid 359 substitution as indicated in Table 7). Each clone was verified by sequencing after insertion into the pNB1u vector, RNA was made and injected into oocytes as described above. Uptake activity of each clone is given in FIG. 2 and Table 7.

[0461] In conclusion, BrGTR2 containing a stop codon was non-functional, indicating that the truncated form of the protein is nonfunctional in planta, whereas remaining mutations exhibited varying transport activity. These varying transport activities indicate that amino acid positions that were subject to substitution are important for BrGTR2 transport activity. According to the proposed model for POT proteins, transmembrane helices no. 1, 2, 4, 5, 7, 8, 10 and 11 line the central pore of the transporter and are involved in the transport mechanism. Remaining helices (no. 3, 6, 9 and 12) are found in the periphery and may confer structural stability. Mutations BrGTR2 (G126R) and BrGTR2 (S359F) are in transmembrane helix 3 and 7, respectively. Helix 3 should not be involved in the transport mechanism; therefore, it can be hypothesized that BrGTR2 (G126R) may have severely disrupted the protein tertiary structure, leading to almost no uptake activity. Helix 7 lines the central pore, where transport occurs; thus, the increased uptake activity seen for this BrGTR2 (S359F) could be due to the transition from a small side chain (serine) to a large side chain (phenylalanine), leading to an enlargement of the pore. The change in polarity of the S359F-transition may further contribute to the increased activity. Mutation BrGTR2 (G145R) causes no significant change in uptake of 4-MTB. Mutation BrGTR2 (E192K) in the cytoplasmic loop between helices 4 and 5 seems to cause a reduction in glucosinolate uptake. An amino acid shift from a negatively charged glutamic acid to a positively charged lysine is quite drastic and possibly may have disrupted protein structure. Furthermore, a phosphorylation site has been suggested on the peptide sequence “ser-glu-ser-gly-lys-arg” of AtGTR2. An alignment of AtGTR2 and BrGTR2 shows that this sequence is conserved and that the peptide corresponds to the residues 191-196 in BrGTR2. Thus, if one of the serines (191 and 193) surrounding the mutated glutamic acid (E192K) is normally phosphorylated (or dephosphorylated), this could be prevented by the transition to lysine; which could in turn reduce uptake activity.

[0462] Characterization of GSL Content in Seed of Mutant GTR Arabidopsis Plants

[0463] GSL analysis of segregating progeny from heterozygous atgtr1, atgtr2 and atgtr3 mutants showed that seeds from homozygous atgtr3 plants contain wild type levels of total aliphatic and indole GSLs. Similarly, atgtr1 had no significant reduction in total aliphatic and indole glucosinolate content per seed whereas atgtr2 seeds about 50% reduction in total aliphatic GSLs concentrations (FIGS. 4A-C and 5A). In addition, indole GSL content was not detectable in atgtr2 seeds. When analyzing 20 seeds per plant, GSL levels in seeds from each homozygous atgtr1/atgtr2 line were below detection limits, indicating a critical role for the combined activities of AtGTR1 and AtGTR2 in transporting GSLs into seeds. When analyzing 10 mg seeds from wildtype and atgtr1/atgtr2 plants, it was possible to detect trace amounts of glucosinolates in seeds from atgtr1/atgtr2 plants at 250 fold lower levels compared to wildtype.

[0464] For molecular complementation, respectively, a AtGTR1 construct including 2 kb promoter, the genomic sequence fused to YFP and 3′UTR and a AtGTR2 construct consisting of the 2 kb promoter followed by the genomic sequence were introduced into the atgtr1/atgtr2 double mutant and were shown to restore both aliphatic and indole GSL content in seeds (FIG. 4E-F). This demonstrates that the GSL-free seed phenotype in the atgtr1/atgtr2 mutant is due to the absence of AtGTR1 and AtGTR2 transport proteins.

[0465] Characterization of GSL Content in Leaves of Mutant GTR Arabidopsis Plants

[0466] GSL levels were measured in entire rosettes before bolting, after bolting and at senescence. In rosettes from wildtype plants, aliphatic GSL content was measured to, respectively, 28±13 and 68±19 nmol/rosette before and after bolting and to 8±3 nmol in senescent rosettes. In contrast, in rosettes from atgtr1/atgtr2 plants, aliphatic GSL content increased dramatically from 27±11 before bolting to 410±78 nmol/rosette after bolting and remained at 161±31 nmol/rosette at senescence. atgtr1 and atgtr2 single knockout line rosettes contained intermediate levels compared to the atgtr1/atgtr2 rosettes (FIG. 4B). In comparison to aliphatic GSLs, indole GSL content displayed a larger variation in rosette tissues. However, when comparing wildtype to atgtr1/atgtr2 rosettes after bolting and at senescence, atgtr1/atgtr2 rosettes contained in average 2 fold higher indole GSLs. Collectively, these observations indicate that rosette tissues continuously synthesize and export both aliphatic and indole GSLs and demonstrate that both AtGTR1 and AtGTR2 are critical for this activity in wildtype plants.

[0467] Characterization of GSL Content in Stems, Flowers, Leaves, Siliques and Silique Walls of Mutant GTR Arabidopsis Plants

[0468] From plants after bolting, GSL content was determined separately in inflorescences (without siliques and cauline leaves), cauline leaves, total intact siliques (including seeds) and silique walls from single dissected siliques (lowest and most mature). In addition, single silique walls were analysed at senescence.

[0469] In wildtype plants after bolting, inflorescences minus siliques and cauline leaves contained 200±46 nmol aliphatic GSLs per inflorescence whereas inflorescences from atgtr1/atgtr2 plants contained 61±28 nmol and inflorescences atgtr1 and atgtr2 plants contained intermediate levels (FIG. 5C). In cauline leaves from wildtype plants after bolting, aliphatic GSL content amounted to 59±15 nmol per total cauline leaves while atgtr1/atgtr2 mutants contained 181±20 nmol in their cauline leaves (FIG. 5C). Increased contents were also observed for aliphatic GSLs in silique walls where concentrations in atgtr1/atgtr2 plants after bolting were 8.8±3 nmol per silique wall in contrast to 2.9±0.8 nmol/silique wall from wildtype plants. At senescence, GSL levels in silique walls from wildtype decreased to 0.3±0.13 nmol per silique wall whereas atgtr1/atgtr2 silique walls retained 3±0.78 nmols (FIG. 5D).

[0470] Collectively, these observations indicate that at this developmental stage, cauline leaves and silique walls in addition to rosette tissues function as GSL sources, whereas the entire inflorescence or parts thereof appears to constitute sinks for AtGTR1 and AtGTR2 mediated GSL transport. Two additional observations are noteworthy when analyzing siliques. Firstly, no significant differences were observed in GSL content when analyzing intact siliques from wildtype or atgrt1/atgtr2 mutants after bolting (FIG. 5C) which indicates that at this developmental stage GSL content of the intact siliques does not exclusively depend on the activity of AtGTR1 and AtGTR2 (FIG. 5D). Secondly, in contrast to the other tissues atgtr1 and atgtr2 single mutants after bolting did not exhibit an intermediate phenotype compared to atgtr1/atgtr2, on the contrary both atgtr1 and atgtr2 resembled wildtype possibly indicating an intriguing synergistic effect of mutating both transporters (FIG. 5D).

[0471] When calculating the balance of total aliphatic GSL content in the various tissues of the plants after bolting, atgtr1/atgtr2 plants is seen to contain an excess of about 460 nmol in rosettes and cauline leaves compared to wildtype. As this increase is only met by an about 160 nmol decrease in stems and intact siliques in atgtr1/atgtr2 plants, this results in an about 300 nmol increased content of total aliphatic GSLs per total aerial parts in atgtr1/atgtr2 plants compared to wildtype (Table 8).

TABLE 8
Aliphatic glucosinolate content per tissue (nmol/g) in soil grown plants
after bolting

| | Wildtype | atgtr1/atgtr2 |
|---|---|---|
| Rosette | 68 ± 19 | 410 ± 78 |
| Cauline leaves | 59 ± 15 | 181 ± 20 |
| Intact siliques | 83 ± 25 | 67 ± 22 |
| Stems | 200 ± 46 | 61 ± 28 |
| Balance | 398 ± 51 | 703 ± 75 |

[0472] Characterization of GSL Content in Roots of Mutant GTR Arabidopsis Plants

[0473] GSL concentrations were measured in roots, rosettes and inflorescence from hydroponically grown plants before and after bolting. Before bolting, aliphatic glucosinolate content in wildtype roots was 1.75±0.28 nmol/mg fresh weight, whereas atgtr1/atgtr2 roots contained 20 fold less (0.08±0.06 nmol/mg). After bolting, roots from wildtype plants contained 0.8±0.14 nmol/mg aliphatic glucosinolates whereas roots from atgtr1/atgtr2 plants contained 0.2±0.06 nmol/mg i.e. 4 fold less (FIG. 6A). In contrast to soil grown plants, aliphatic glucosinolate content in the corresponding rosettes from hydronically grown plants before bolting was 2-fold higher in atgtr1/atgtr2 plants (1.33±0.11 nm/mg) compared to wildtype (0.64±0.1 nmol/mg) (FIG. 6B). After bolting the fold difference between rosettes from wildtype and atgtr1/atgtr2 plants became more pronounced with wildtype plants containing 0.35±0.13 nmol/mg whereas atgtr1/atgtr2 rosettes contained 1.44±0.16 nmol/mg i.e. 4 fold higher concentrations (FIG. 6B). Lastly, no significant differences was seen in aliphatic glucosinolate concentration between inflorescences from wildtype and atgtr1/atgtr2 plants (FIG. 6B). Taken together these observations show that the increased glucosinolate accumulation in atgtr1/atgtr2 aerial tissues, to a large extent, can be accounted for by amounts otherwise transported to the roots. Roots thus constitute a strong and yet unidentified sink for glucosinolate transport.

[0474] Characterization of Tissue, Cellular and Subcellular Localization of AtGTR1&2 in Arabidopsis Plants

[0475] 2 kb of the respective promoters were used to drive the expression of a beta-D-glucoronidase (GUS). Before bolting pGTR1::GUS activity was confined to distinct spots surrounding the hydathodes. In contrast, after bolting pGTR1::GUS activity was detected throughout the leaf including the vascular tissue, mesophyl and epidermis of rosette leaves. In developing flowers, pGTR1::GUS activity was found in individual cells in the epidermis of sepals, while developing siliques showed activity in the epidermis as well as in the funiculus. This expression pattern indicated that AtGTR1 may play a general role in transporting glucosinolates between cells throughout the leaf after bolting. The localization to the epidermis indicated that glucosinolates might be transported to the outer perimeter of leaves.

[0476] In pGTR2::NLS-GFP-GUS transgenic plants GUS activity was strongly and predominantly detected in the vascular tissue throughout development with some activity also detected in the epidermis of leaves. GUS activity was furthermore detected in the vasculature of sepals, petals and in the filaments of developing flowers. Expression was also detected in the vascular tissue of silique walls and the funiculus of developing seeds. In comparison, GUS activity could not be detected in any tissue of nontransformed plants at any developmental stage. The apparent confined and constitutive expression of AtGTR2 in the vascular tissue indicated a major role in transporting glucosinolates across barriers in the vascular tissue to enable long distance transport to sinks

### Materials and Methods

### Example 3

[0477] Plant Material and Growth Conditions:

[0478] For GSL analysis and expression localization studies in above ground tissues, Arabidopsis plants (ecotype Columbia-0) were cultivated on soil in 4 cm pots in growth chambers at 20° C., at 16 hour light (700 μE*m*⁻²*s⁻¹). For GSL analysis in roots, plants were grown in a hydroponic system as described in (Lehmann et al. 2009, Mol Plant 2: 390-406). Briefly, seeds were germinated on 0.5% plant agar/50% Gibeaut's nutrient solution (Gibeaut et al., 1997, Plant Physiol 115: 317-319) in 0.5 ml microfuge tubes held in an empty pipette-tip box. Approximately one week after germination, the bottoms of the tubes were cut off and the boxes filled with 100% nutrient solution. The plants were transferred to larger containers approximately two weeks later and were grown under a 16 h:8 h photoperiod, 20° C. Nutrient solution was changed weekly, and the genotypes were grown in separate containers. Harvesting of individual tissues for glucosinolate analysis was performed as described for soil-grown plants.

[0479] GSL Extraction and Analysis from Plant Tissues:

[0480] GSL levels were analyzed in a representative line (of three identified for each) for each genotype originating from the atgtr1-1xatgtr2-1 cross at three time points, 1) Before bolting: 3-week old plants (growth stage 1.10-1.12) characterized by a fully formed rosette with 10-14 leaves before emergence of inflorescence, 2) After bolting: 5 week old plants (growth stage 6.10-6.30) characterized by the lowest silique being at full length and the presence of at least 7-10 developing siliques, 3) Senescence: 8-9 week old plants (growth stage 9.7) characterized by senescent dry green tissues and all siliques developed containing mature seeds. Growth stages definitions are as described previously (Boyes et al., 2001, Plant cell 13: 1499-1510). GSL levels were also analyzed in the representative line for each genotype in rosettes, roots and inflorescence in hydroponically grown plants before and after bolting.

[0481] For analyses performed on plants before and after bolting grown in soil or hydroponically fresh tissue was harvested and homogenized. Specifically for analyses of silique walls after bolting intact siliques were freeze dried prior to dissection into silique walls and immature seeds. For analyses of senescent plants dry tissue were harvested and homogenized. For mature seed analysis 20 seeds were analyzed. GSLs were extracted and analyzed as desulfo GSLs as described previously (Hansen et al. 2007, Plant J 50:902-910) using an HP1200 Series HPLC from Agilent equipped with a C-18 reversed phase column (Supelcosil LC-18-DB, 25 cm×4.6 mm, 5 μm particle size, Supelco, Bellefonte, Pa., USA) by using a water (solvent A)-acetonitrile (solvent B) gradient at a flow rate of 1 ml min⁻¹ (injection volume 45 μl). The gradient was as follows: 1.5-7% B (5 min), 7-25% (6 min), 25-80% (4 min), 80% B (3 min), 80-35% B (2 min), 35-1.5% B (2 min), and 1.5% B (3 min). The eluent was monitored by diode array detection between 200 and 400 nm (2-nm interval). Desulfo-GSLs were identified based on comparison of retention times and UV absorption spectra with those of known standards (Reichelt et al., 2002). Results are given as nmols calculated relative to response factors (Brown et al., 2003; Fiebig and Arens, 1992).

[0482] Construction of Reporter and Complementation Constructs:

[0483] The E. coli strain DH10B was used for all cloning. For AtGTR1 and AtGTR2 promoter:reporter constructs, promoters were amplified from Arabidopsis (Col-0) genomic DNA, using primers AtGTR1 pf (SEQ ID NO: 110) and AtGTR1 pr (SEQ ID NO: 111) for the AtGTR1 promoter and primers AtGTR2pf (SEQ ID NO: 112) and AtGTR2pr (SEQ ID NO: 113) for the AtGTR2 promoter. Promoter fragments were USER cloned into pCambia3300u-NLS-GPF-GUS, upstream of a nuclear localization signal followed by GFP fused to beta-D-glucoronidase (Chytilova et al., 1999, Ann. Bot. 83: 645-654). For complementation construct AtGTR2 promoter-ATGTR2 genomic gene fragments was PCR amplified using primers AtGTR2pf (SEQ ID NO: 112) and AtGTR2pr (SEQ ID NO: 113) and USER cloned into pCambia1300u. For complementation construct AGTR1 promoter-AtGTR1 genomic gene-YFP-3′UTRs each fragment was PCR amplified using primers AtGTR1pf (SEQ ID NO: 110) and AtGTR1r-YFP (SEQ ID NO: 114) for promoter-genomic gene fragment, primers YFPf-AtGTR1-fusion (SEQ ID NO: 115) and YFPr-pot13′UTRfusion (SEQ ID NO: 116) for YFP fragment and primer AtGTR1(3′UTR)f-YFP fusion (SEQ ID NO: 117) and AtGTR1(3′UTR)r (SEQ ID NO: 118) for 3′UTR fragment. Fragments were USER fused into the pCambia1300u vector, Plant expression plasmids were used to transform Agrobacterium (GV3101) for stable Arabidopsis transformations.

[0484] Staining of Transgenic Arabidopsis Plants for GUS Activity:

[0485] X week old Arabidopsis GTR1 prom-GFP-GUS and GTR2 prom-GFP-GUS plants were submerged in a solution containing 1 mM X-Glc, 0.5% Triton X-100, 20% (v/v) methanol, 100 mM Tris-HCl (pH 7.5) and 10 mM ascorbate, and incubated at 37′C for 16 hours. Chlorophyll were cleared after staining by washing and incubation in 70% ethanol.

### Example 4

### Generation and Characterization of Mutant Brassica GTR Genes and Plants and Plant Parts Comprising them

[0486] Seeds from Brassica plants (M0 seeds) are exposed to EMS. M1 plants are grown from mutagenized seeds (M1 seeds) and selfed to generate M2 seeds. M2 plants are grown and DNA samples are prepared from plant samples. The DNA samples are screened for the presence of point mutations in the GTR genes causing the introduction of STOP codons in the protein-encoding regions of the GTR genes, the substitution of amino acids in the GTR proteins or splice site mutations by direct sequencing with GTR-specific primers as described above and analyzing the sequences for the presence of the point mutations. For each mutant GTR gene identified in the DNA sample of an M2 plant, M2 plants derived from the same M1 plant as the M2 plant comprising the GTR mutation are grown and DNA samples are prepared from plant samples of each individual M2 plant. The DNA samples are screened for the presence of the identified GTR point mutation.

[0487] The following mutant alleles in B. napus have been isolated and the total glucosinolate content was tested in M3 wet seeds:
[0488] a. GTR2-C2-ems02
[0489] b. GTR2-C1-ems05
[0490] c. GTR2-C1-ems01
[0491] d. GTR2-A2-ems09
[0492] e. GTR2-A2-ems03
[0493] f. GTR2-A1-ems01

[0494] For more details concerning the mutant alleles see Tables 3a and 3b. The results are summarized in FIG. 10. The maximal reduction in total glucosinolates observed was 51% with single gene knock-outs. Each gene copy tested resulted in similar effects. The high level of variation may be related to the high number of unrelated background mutations in non-backcrossed material.

[0495] Mutant GTR alleles are thus generated and isolated. Also, plants comprising such mutant alleles can be used to combine selected mutant and/or wild type alleles in a plant, for example a Brassica breeding line, as follows: A Brassica plant containing a mutant GTR gene (donor plant line) is crossed with a Brassica plant lacking the mutant GTR gene (acceptor plant line). The following introgression scheme is used (the mutant GTR gene is abbreviated to gtr while the wild type is depicted as GTR):

[0496] Initial cross: gtr/gtr (donor plant) X GTR/GTR (acceptor plant, e.g. breeding line)

[0497] F1 plant: GTR/gtr

[0498] BC1 cross: GTR/gtr X GTR/GTR (acceptor plant)

[0499] BC1 plants: 50% GTR/gtr and 50% GTR/GTR

[0500] The 50% GTR/gtr are selected using molecular markers (e.g. AFLP, PCR, Invader™ and the like) for the mutant GTR allele (gtr).

[0501] BC2 cross: GTR/gtr (BC1 plant) X GTR/GTR (acceptor plant)

[0502] BC2 plants: 50% GTR/gtr and 50% GTR/GTR

[0503] The 50% GTR/gtr are selected using molecular markers for the mutant GTR allele (gtr).

[0504] Backcrossing is repeated until BC3 to BC6

[0505] BC3-6 plants: 50% GTR/gtr and 50% GTR/GTR

[0506] The 50% GTR/gtr are selected using molecular markers for the mutant GTR allele (gtr). To reduce the number of backcrossings (e.g. until BC3 in stead of BC6), molecular markers can be used specific for the genetic background of the acceptor plant line.

[0507] BC3-6 S1 cross: GTR/gtr X GTR/gtr

[0508] BC3-6 S1 plants: 25% GTR/GTR and 50% GTR/gtr and 25% gtr/gtr

[0509] Plants containing gtr are selected using molecular markers for the mutant GTR allele (gtr). Individual BC3-6 S1 plants that are homozygous for the mutant GTR allele (gtr/gtr) are selected using molecular markers for the mutant and the wild-type GTR alleles. These plants are then used for seed production.

[0510] Characterization of GSL Content in Parts of Mutant GTR Brassica Plants

[0511] The GSL content of seed, stems, flowers, leaves, roots, siliques and silique walls is analysed in mutant GTR Brassica plants as described above for the mutant GTR Arabidopsis plants. Brassica plants comprising specific combinations of mutant GTR genes resulting in specific GSL contents in specific plant parts are selected for further breeding, for seed production or for crop cultivation.

[0512] WT and mutated (by Targeting Induced Local Lesions IN Genomes, TILLING) Brassica rapa seeds of the ecotype “R-0-18” (inbred line of the Brassica rapa subsp. trilocularis) were purchased from Reverse Genetics UK (RevGenUK). Seeds were sown on plant substrate and watered with Bactimos (B. thuringiensis israelensis; after sowing, the seeds were cold-stratified at 4° C. for two days to obtain a high and uniform germination rate. Finally, germinating seeds were transferred to a growth chamber with 16 hours day length and a temperature of 20° C. B. rapa plants used for analyses were 2.5 months old; they had green siliques containing immature green seeds. The number of replicate plants used in the experiment was n=5 plants.

[0513] B. rapa leaves and other tissues were weighted and homogenized in liquid N2 using either a mortar (leaves and roots) or a blender (stem and siliques). Glucosinolates from the ice-cold homogenized plant material were extracted in 85% methanol containing p-hydroxybenzyl glucosinolate (pOHB) as internal standard. Part of the supernatant was transferred to a 96-well filter plate loaded with 45 μl DEAE Sephadex™ A-25 column material. Glucosinolates were bound to the column material while samples were sucked through the filter plate by applying brief vacuum. Afterwards, columns were washed with 70% methanol and water. A sulfatase solution (2 mg/ml) was added to the columns and allowed to incubate at room temperature overnight. 100 μl water were applied to the columns and a short spin eluted the desulfo-glucosinolates into a 96-well format plate. The samples were analyzed on an Agilent technologies 1200 series HPLC-DAD system and separated on a Zorbax SB-AQ column. FIG. 12 summarizes the glucosinolate concentration in the different tissues of wt and knock-out B. rapa, while FIG. 13 summarizes the weight of these tissues

### Example 5

### Generation and Characterization of Mutant GTR1 and GTR2 Alleles with Altered Phosphorylation/Dephosphorylation Status

[0514] Arabidopsis thaliana GTR1 and GTR2 alleles which mimic constitutive phosphorylation or dephosphorylation were constructed based on experimentally verified phosphorylation sites fsearchable in the http://phosphat.mpimp-golm.mpg.de/—a database collecting phosphoproteomics data. Phosphorylation was mimicked by substituting the possible phosphorylation site amino acid (S or T) with aspartic acid. Dephosphorylation was mimicked by substituting for alanine. The following constructs were made:

[0515] Constructs encoding a GTR1 protein with the amino acid sequence of SEQ ID NO: 2 with the following substitutions:
[0516] a. S at position 22 for A
[0517] b. S at position 22 for D
[0518] c. T at position 105 for A
[0519] d. T at position 105 for D
[0520] e. S at position 605 for A
[0521] f. S at position 605 for D
   (which corresponds to the amino acid sequence of SEQ ID No: 142 with the following substitution:
[0522] g. S at position 52 for A
[0523] h. S at position 52 for D
[0524] i. T at position 135 for A
[0525] j. T at position 135 for D
[0526] k. S at position 635 for A
[0527] l. S at position 635 for D
   or constructs encoding a GTR2 protein with the amino acid sequence of SEQ ID No: 4 with the following substitutions:
[0528] m. T at position 58 for A
[0529] n. T at position 58 for D
[0530] o. T at position 117 for A
[0531] p. T at position 117 for D
[0532] q. T at position 323 for A
[0533] r. T at position 323 for D
   Also tested were GTR1 or GTR2 encoding constructs wherein the Proline at position 492 (or 522) was substituted by Leucine.

[0534] Phosphorylation/dephosphorylation constructs were assayed for proton dependent import of the glucosinolate 4-MTB (4-methylsulfinylbutyl glucosinolate) at a concentration of 100 μM. 5 Oocytes were injected with cRNA (times 4 replications) of one of the constructs (at a 100 ng/μl) and kept at 17 degrees for 5 days. On day 5 the oocytes were preincubated for 5 minutes in Kulori pH 5 and then transferred to the assay media (Kulori pH5 with 4-MTB at a concentration of 100 μM). After one hour oocytes were removed from the media containing 4-MTB and washed 4 times before being extracted in 100% methanol. LC-MS analysis to detect the uptake of 4-MTB was carried out and the results presented in FIG. 11.

[0535] It can be observed that constitutive dephosphorylation of GTR1 at position S22 (S52*) turns of f transport completely. Likewise it can be observed that phosphorylation of the same residue keeps the import intact. Furthermore, it can be observed that dephosphorylation of GTR2T58 keeps the transport activity intact whereas phosphorylation of the same residue inactivates the transport. Both constitutive phosphorylation and dephosphorylation of T105 (T135*) in GTR1 and T117 in GTR2 block the transport activity. It could also be observed that mutating GTR1P492 (P522*) and GTR3P492 to a leucine inactivates transport activity. In summary it can be concluded that phosphorylation/dephosphorylation at specific residues regulates GTR1 and GTR2 mediated glucosinolate transport. (amino acid position indicated by * are with reference to the long version of GTR1 including the N-terminal extension of 30 AA)

### Example 6

### Downregulation of GTR1 and/or GTR2 Expression in Brassica spp. Using dsRNA Constructs

[0536] Using standard recombinant DNA techniques dsRNA encoding recombinant genes are constructed comprising the following operably linked DNA fragments

[0537] a) GTR1 downregulating recombinant gene
[0538] i. a plant expressible promoter such as CaMV35S
[0539] ii. a DNA region comprising the nucleotide sequence of SEQ ID 138
[0540] iii. a transcription termination and polyadenylation region, such as the 3′ nos region.

[0541] b) GTR2 downregulating recombinant gene
[0542] i. a plant expressible promoter such as CaMV35S
[0543] ii. a DNA region comprising the nucleotide sequence of SEQ ID 139
[0544] iii. a transcription termination and polyadenylation region, such as the 3′ nos region.

[0545] c) GTR1/GTR2 downregulating recombinant gene
[0546] i. a plant expressible promoter such as CaMV35S
[0547] ii. a DNA region comprising the nucleotide sequence of SEQ ID 140
[0548] iii. a transcription termination and polyadenylation region, such as the 3′ nos region.

[0549] These dsRNA encoding recombinant genes are introduced (separately) between the borders of a T-DNA vector together with a selectable marker gene such as the phosphinotricin acetyltransferase encoding selectable marker gene. The T-DNA vector is introduced into an Agrobacterium strain comprising a helper Ti-plasmid using conventional methods. Hypocotyl explants of Brassica napus are obtained, cultured and transformed essentially as described by De Block et al. (1989), Plant Physiol. 91: 694) to transfer the chimeric genes into Brassica napus plants.

[0550] Transgenic Brassica napus plant are identified and analyzed for glucosinolate content in leaves and seeds.

[0551] The invention thus includes the embodiments as described in the following paragraphs:
[0552] 1. A method for modifying the glucosinolate (GSL) content in a Brassicales plant or part thereof comprising modifying the functional activity of at least one glucosinolate transport (GTR) protein comprising an amino acid sequence having at least 33% sequence identity with SEQ ID NO: 2 or SEQ ID NO: 142 in cells of said plant or said plant part.
[0553] 2. The method of paragraph 1, wherein the GTR protein comprises an amino acid sequence having at least 80% sequence identity with SEQ ID NO: 2, 4, 6, 8, 10, 12 or 142.
[0554] 3. The method of paragraph 1 or 2, wherein the GTR protein comprises an amino acid sequence having at least 80% sequence identity with any one of SEQ ID No. 14, 16, 18, 20, 22, 24, 26, 28, 30, 32, 34, 36, 38, 40, 42, 44, 46, 48, 50, 52, 54, 56, 58, 60, 120, 122, 124, 126, 128, 130, 144, 146, 148 or 150.
[0555] 4. The method of paragraph 1 or 2, wherein the GTR protein comprises an amino acid selected from SEQ ID No. 14, 16, 18, 20, 22, 24, 26, 28, 30, 32, 34, 36, 38, 40, 42, 44, 46, 48, 50, 52, 54, 56, 58, 60, 120, 122, 124, 126, 128, 130, 144, 146, 148 or 150.
[0556] 5. The method of any one of paragraphs 1 to 4, wherein the GTR protein is encoded by a nucleic acid having at least 80% sequence identity with any of SEQ ID No. 13, 15, 17, 19, 21, 23, 25, 27, 29, 31, 33, 35, 37, 39, 41, 43, 45, 47, 49, 51, 53, 55, 57, 59, 119, 121, 123, 125, 127, 129, 131, 132, 133, 134, 135, 136, 137, 143, 145, 147 or 149.
[0557] 6. The method of any one of paragraphs 1 to 5, wherein the GTR protein is encoded by a nucleic acid selected from SEQ ID No. 13, 15, 17, 19, 21, 23, 25, 27, 29, 31, 33, 35, 37, 39, 41, 43, 45, 47, 49, 51, 53, 55, 57, 59, 119, 121, 123, 125, 127, 129, 131, 132, 133, 134, 135, 136, 137, 143, 145, 147 or 149.
[0558] 7. The method of any one of paragraphs 1 to 6, comprising modifying the functional activity of at least two GTR proteins.
[0559] 8. The method of paragraph 7, wherein a first GTR protein comprises an amino acid sequence having at least 80% sequence identity with SEQ ID NO: 2 or SEQ ID NO: 142 and a second GTR protein comprises an amino acid sequence having at least 80% sequence identity with SEQ ID NO: 4.
[0560] 9. The method of paragraph 7, wherein said first GTR protein comprises an amino acid sequence having at least 80% sequence identity with any one of SEQ ID No. 14, 16, 18, 20, 22, 24, 38, 40, 42, 50, 52, 54 or 144, 146, 148 or 150 and wherein said second GTR protein comprises an amino acid sequence having at least 80% sequence identity with any one of SEQ ID No. 26, 28, 30, 32, 34, 36, 44, 46, 48, 56, 58, 60, 120, 122, 124, 126, 128, or 130.
[0561] 10. The method of paragraph 7, wherein said first GTR protein comprises an amino acid sequence selected from SEQ ID No. 14, 16, 18, 20, 22, 24, 38, 40, 42, 50, 52 or 54 or 144, 146, 148, 150 and wherein said second GTR protein comprises an amino acid sequence selected from SEQ ID No. 26, 28, 30, 32, 34, 36, 44, 46, 48, 56, 58, 60, 120, 122, 124, 126, 128, or 130.
[0562] 11. The method of paragraph 7, wherein said first GTR protein is encoded by a nucleic acid having at least 80% sequence identity with any one of SEQ ID No. 13, 15, 17, 19, 21, 23, 37, 39, 41, 49, 51, 53 or 137 or 143, 145, 147, 149 and wherein said second GTR protein is encoded by a nucleotide sequence having at least 80% sequence identity with any one of SEQ ID No. 25, 27, 29, 31, 33, 35, 43, 45, 47, 55, 57, 59, 119, 121, 123, 125, 127, 129, 131, 132, 133, 134, 135, 136.
[0563] 12. The method of paragraph 7, wherein said first GTR protein is encoded by a nucleic acid selected from SEQ ID No. 13, 15, 17, 19, 21, 23, 37, 39, 41, 49, 51, 53 or 137 or 143, 145, 147, 149 and wherein said second GTR protein is encoded by a nucleotide sequence selected from SEQ ID No. 25, 27, 29, 31, 33, 35, 43, 45, 47, 55, 57, 59, 119, 121, 123, 125, 127, 129, 131, 132, 133, 134, 135, 136.
[0564] 13. The method of any one of paragraphs 1 to 12, comprising reducing the functional GTR activity in cells of said plant or plant part.
[0565] 14. The method of paragraph 13, wherein the GSL content is decreased in plant seed.
[0566] 15. The method of paragraph 13, wherein the GSL content is increased in green plant tissue.
[0567] 16. The method of any one of paragraphs 9 to 12, wherein said reduction of functional GTR activity comprises down-regulation of GTR gene expression.
[0568] 17. The method of any one of paragraphs 1 to 16, wherein said reduction of functional GTR activity comprises down-regulation of GTR protein activity.
[0569] 18. The method according to paragraph 17, comprising introducing an RNA molecule in said plant or plant part, wherein said RNA molecule comprises a GTR-inhibitory RNA molecule capable of down-regulating the expression of said GTR gene.
[0570] 19. The method of paragraph 18, comprising introducing a chimeric DNA construct in said plant or plant part, wherein said chimeric DNA construct comprises the following operably linked DNA regions:
   [0571] a) a promoter, operative in said plant or plant part;
   [0572] b) a transcribed DNA region, which when transcribed yields a GTR-inhibitory RNA molecule, said GTR-inhibitory RNA molecule being capable of down-regulating the expression of said GTR gene;
   [0573] c) a DNA region involved in transcription termination and polyadenylation.
[0574] 20. The method of paragraph 19, wherein said transcribed DNA region encodes a sense RNA molecule, said DNA region comprising a nucleotide sequence of at least 20 nucleotides with at least 95% identity to the DNA strand of said GTR gene.
[0575] 21. The method of paragraph 19, wherein said transcribed DNA region encodes an antisense RNA molecule, said DNA region comprising a nucleotide sequence of at least 20 nucleotides with at least 95% identity to the complement of the DNA strand of said GTR gene.
[0576] 22. The method of paragraph 19, wherein said transcribed DNA region encodes a double-stranded RNA molecule, comprising:
   [0577] a) a sense RNA region comprising at least 20 consecutive nucleotides having at least 95% identity to said GTR gene;
   [0578] b) an antisense RNA region comprising at least 20 nucleotides complementary to said sense RNA region;
      [0579] wherein said sense and antisense RNA regions are capable of forming a double stranded RNA region and wherein said double-stranded RNA molecule is capable of down-regulating the expression of said GTR gene.
[0580] 23. The method of paragraph 22 wherein said transcribed DNA region comprises a nucleotide sequence selected from the nucleotide sequence of SEQ ID No. 138, 139 or 140.
[0581] 24. The method of paragraph 19, wherein said transcribed DNA region encodes a pre-miRNA molecule which is processed into a miRNA capable of guiding the cleavage of mRNA transcribed from said GTR gene.
[0582] 25. The method of any one of paragraphs 19 to 24, wherein said promoter is a tissue-specific or inducible promoter.
[0583] 26. The method of paragraph 25, wherein said promoter is a seed-specific promoter.
[0584] 27. The method of paragraphs 16 or 17, comprising altering the nucleotide sequence of the endogenous GTR gene.
[0585] 28. The method according to paragraph 27 wherein the GTR protein is a protein comprising the amino acid sequence of SEQ ID NO: 2 with any of the following substitutions:
   [0586] a) S at position 22 for A
   [0587] b) S at position 22 for D
   [0588] c) T at position 105 for A
   [0589] d) T at position 105 for D
   [0590] e) S at position 605 for A
   [0591] f) S at position 605 for D
   [0592] or wherein the GTR protein is a protein comprising the amino acid sequence of SEQ ID NO: 142 with any of the following substitutions:
   [0593] g) S at position 52 for A
   [0594] h) S at position 52 for D
   [0595] i) T at position 135 for A
   [0596] j) T at position 135 for D
   [0597] k) S at position 635 for A
   [0598] l) S at position 635 for D.
[0599] 29. The method according to paragraph 27 wherein the GTR protein is a protein with the amino acid sequence of SEQ ID No: 4 with the following substitutions:
   [0600] a) T at position 58 for A
   [0601] b) T at position 58 for D
   [0602] c) T at position 117 for A
   [0603] d) T at position 117 for D
   [0604] e) T at position 323 for A
   [0605] f) T at position 323 for D
[0606] 30. The method according to paragraph 27 wherein the GTR protein is encoded by a nucleic acid of SEQ ID No. 25
   [0607] a) comprising a stop codon at position 1241 to 1243
[0608] 31. The method according to paragraph 27 wherein the GTR protein is encoded by a nucleic acid of SEQ ID No. 31
   [0609] a) comprising a stop codon at position 929 to 931
   [0610] b) comprising a stop codon at position 1145 to 1147
[0611] 32. The method according to paragraph 27 wherein the GTR protein is encoded by a nucleic acid of SEQ ID No. 27
   [0612] a) comprising a stop codon at position 870 to 872
   [0613] b) comprising a stop codon at position 1380 to 1382
[0614] 33. The method according to paragraph 27 wherein the GTR protein is encoded by a nucleic acid of SEQ ID No. 33
   [0615] a) comprising a stop codon at position 780 to 782
[0616] 34. The method according to paragraph 27 wherein the GTR protein is a protein with the amino acid sequence of SEQ ID No. 66 comprising a mutation at any of the following positions:
   [0617] a) Gly 126
   [0618] b) Gly 145
   [0619] c) Glu 192
   [0620] d) Trp 229
   [0621] e) Ser 359
[0622] 35. The method of any one of paragraphs 1 to 34, wherein said plant is a Brassica plant.
[0623] 36. A plant or plant part obtainable by the method of any one of paragraphs 1 to 34.
[0624] 37. Seed from the plant of paragraph 36.
[0625] 38. Seed meal from the seed of paragraph 37.
[0626] 39. Green plant tissue from the plant of paragraph 36.
[0627] 40. Oil from the plant of paragraph 35 or the seed of paragraph 37.
[0628] 41. Use of the plant or plant part of paragraph 36 in animal feed.
[0629] 42. Use of the plant or plant part of paragraph 36 in pest management, in particular in biofumigation.
[0630] 43. Use of the plant or plant part of paragraph 36 in cancer-prevention.
[0631] 44. Use of a GTR-encoding nucleic acid sequence to obtain a modified GSL content in a plant or plant part.
[0632] 45. A method for producing seed or seed meal comprising growing a plant with reduced functional GTR activity and recovering seed from said plant.
[0633] 46. A chimeric DNA construct as described in any one of paragraphs 19 to 32.
[0634] 47. A nucleic acid encoding a mutant GTR protein, wherein the corresponding wildtype GTR protein comprises an amino acid sequence having at least 33% sequence identity with SEQ ID NO: 2 or SEQ ID NO:142.
[0635] 48. The nucleic acid of paragraph 33, wherein the wildtype GTR protein comprises an amino acid sequence having at least 80% sequence identity with SEQ ID NO: 2, 4, 6, 8, 10 or 12 or SEQ ID NO: 142.
[0636] 49. A mutant GTR protein encoded by the nucleic acid of paragraph 47 or 48.
[0637] 50. A method for identifying a nucleic acid according to paragraph 47 or 48 in a biological sample comprising determining the presence of a mutated DNA region in a nucleic acid of the sample, said mutated DNA region comprising at least one deleted, inserted or substituted nucleotide in the mutant GTR nucleic acid compared to a nucleic acid encoding the corresponding wildtype GTR protein.
[0638] 51. A kit for identifying a nucleic acid according to paragraph 45 or 46 in a biological sample, comprising a set of primers or probes, said set selected from the group consisting of:
   [0639] a set of primers or probes, wherein one of said primers or probes specifically recognizes a DNA region 5′ flanking the mutated DNA region and the other of said primers or probes specifically recognizes a DNA region 3′ flanking the mutated DNA region,
   [0640] a set of primers or probes, wherein one of said primers or probes specifically recognizes a DNA region 5′ or 3′ flanking the mutated DNA region and the other of said primers or probes specifically recognizes the mutated DNA region,
   [0641] a set of primers or probes, wherein one of said primers or probes specifically recognizes a DNA region 5′ or 3′ flanking the mutated DNA region and the other of said primers or probes specifically recognizes the joining region between the 3′ or 5′ flanking region and the mutated DNA region, respectively,
   [0642] a probe which specifically recognizes the joining region between a DNA region 5′ or 3′ flanking the mutated DNA region and the mutated DNA region.
[0643] 52. An isolated DNA sequence encoding the amino acid sequence of SEQ ID No. 2, 4, 6, 8, or 12 or 142.
[0644] 53. An isolated DNA sequence encoding the amino acid sequence of SEQ ID No. 14, 16, 18, 20, 22, 24, 26, 28, 30, 32, 34, 36, 38, 40, 42, 44, 46, 48, 50, 52, 54, 56, 58, 60, 120, 122, 124, 126, 128, 130 or 144, 146, 148 or 150.
[0645] 54. An isolated DNA sequence comprising the nucleotide sequence of SEQ ID No. 25, 27, 29, 31, 33, 35, 43, 45, 47, 55, 57, 59, 119, 121, 123, 125, 127, 129, 131, 132, 133, 134, 135, 136 or 143, 145, 147 or 149.
[0646] 55. A chimeric gene comprising the following operably linked DNA fragments:
   [0647] a) a heterologous plant expressible promoter.
   [0648] b) a DNA region encoding the amino acid sequence of SEQ ID No. 2, 4, 6, 8, 10, 12, 14, 16, 18, 20, 22, 24, 26, 28, 30, 32, 34, 36, 38, 40, 42, 44, 46, 48, 50, 52, 54, 56, 58, 60, 120, 122, 124, 126, 128, 130 or 142 or 144, 146, 148 or 150.
   [0649] c) a transcription termination and polyadenylation signal functional in plant cells.
[0650] 56. A plant comprising the chimeric gene of paragraph 55.
[0651] 57. An isolated protein comprising the amino acid sequence of SEQ ID No. 2, 4, 6, 8, 10, 12, 14, 16, 18, 20, 22, 24, 26, 28, 30, 32, 34, 36, 38, 40, 42, 44, 46, 48, 50, 52, 54, 56, 58, 60, 120, 122, 124, 126, 128, 130 or 142 or 144, 146, 148 or 150.
[0652] 58. A mutant GTR allele encoding a GTR protein with an amino acid sequence having at least 80% sequence identity with SEQ ID NO: 2 with any of the following substitutions:
   [0653] a) S at position 22 for A
   [0654] b) S at position 22 for D
   [0655] c) T at position 105 for A
   [0656] d) T at position 105 for D
   [0657] e) S at position 605 for A
   [0658] f) S at position 605 for D
      or encoding a GTR protein with an amino acid sequence having at least 80% sequence identity with SEQ ID NO: 142 with any of the following substitutions:
   [0659] g) S at position 52 for A
   [0660] h) S at position 52 for D
   [0661] i) T at position 135 for A
   [0662] j) T at position 135 for D
   [0663] k) S at position 635 for A
   [0664] l) S at position 635 for D
[0665] 59. A mutant GTR allele encoding a GTR protein having at least 80% sequence identity with the amino acid sequence of SEQ ID No: 4 with the following substitutions:
   [0666] a) T at position 58 for A
   [0667] b) T at position 58 for D
   [0668] c) T at position 117 for A
   [0669] d) T at position 117 for D
   [0670] e) T at position 323 for A
   [0671] f) T at position 323 for D
[0672] 60. A mutant GTR allele having at least 80% sequence identity with the nucleic acid of SEQ ID No. 25
   [0673] a) comprising a stop codon at position 1241 to 1243
[0674] 61. A mutant GTR allele having at least 80% sequence identity with the nucleic acid of SEQ ID No. 31
   [0675] a) comprising a stop codon at position 929 to 931
   [0676] b) comprising a stop codon at position 1145 to 1147
[0677] 62. A mutant GTR allele having at least 80% sequence identity with the nucleic acid of SEQ ID No. 27
   [0678] a) comprising a stop codon at position 870 to 872
   [0679] b) comprising a stop codon at position 1380 to 1382
[0680] 63. A mutant GTR allele having at least 80% sequence identity with the nucleic acid of SEQ No. 33
   [0681] a) comprising a stop codon at position 780 to 782
[0682] 64. A mutant GTR allele encoding a GTR protein having at least 80% sequence identity with the amino acid sequence of SEQ ID No. 66 comprising a mutation at any of the following positions:
   [0683] a) Gly 126
   [0684] b) Gly 145
   [0685] c) Glu 192
   [0686] d) Trp 229
   [0687] e) Ser 359

The application's sequence listing, which the Patent Office published only in electronic form, follows.

SEQUENCE LISTING (150 sequences)

SEQ ID NO: 1 - DNA, 1821 bp, Arabidopsis thaliana
  CDS (1)..(1821)
atggagagaaagcctcttgaggttgagccatctactacgacgactaacaccgatgtggtcgattctttcgaggaagagcagagaaaaatcgtttatagaggatggaaagtcatgccttttatcattggtaatgagacatttgagaagcttgggatcatagggacattatcaaaccttcttgtgtacctaacttctgtattcaaccttaagagctacacagctgcaactatcatcaatgcctttagtggtacaatcaatttcgggacttttattgctgcctttctttgcgacacttactttggtcgctacaagactctcagtgtcgctgtcatcgcttgttttctgggatcgtttgtgatactacttactgctgcaattccgtcgttgcaccccgttgcttgcggaaacaaaatctcgtgcgaagggccaagtgtgggacagatactgtttctgctcatgggtttaggctttcttgtggtaggcgctggtggtatcagaccgtgtaatttagcgtttggtgctgatcagttcaaccccaaatccgaatcaggaaagaaagggatcaacagtttcttcaactggtatttcttcactttcacgttcgcgcagatcatctcgctcacagcagttgtgtatatccagtcaaatgtgagttggacaatcggtttgatcattccggtggctcttatgttcttggcgtgtgtgattttctttgctggcgatagattgtatgtaaaagtgaaagcctcgggtagtccattggctggtattgctcgtgttatagcagccgcgatcaagaaacgaggtttgaagccggttaagcagccttgggtcaatctttacaaccatatcccgtctaactatgcaaatactactctaaaatacaccgaccagttcagatttctagacaaagcagcaattatgacccccgaggagaagttgaactccgatggaacggcttccgatccatggaaactatgcacgttgcagcaagtggaagaagtgaaatgcattgtaagagtgattccaatctggtttgcatccacgatatactaccttgcaataactatacaaatgacttatccggtcttccaagcgctccagagcgaccgacgattaggttctggtggcttcaggattcctgcggccacctatgtagtgttcttgatgactggcatgacagttttcatcatattctacgaccgtgtacttgtcccgtcgctcagaagagtgaccgggttagaaaccggtatatcactcttacaaagaatcggagctgggtttacatttgcgataatgagtttattagtttccgggtttatagaggaaaggagaagaaactttgcattgaccaaaccgacactcgggatggcgcctcggacaggagaaatctcatcaatgtcagcgttgtggctgattccgcagcttacacttgcaggcatagcagaagcttttgctgccattggacaaatggagttttactacaagcagtttcctgaaaacatgaagagcttcgcgggttctatcttttatgtcggtgcaggggtttcgagctacctcgctagcttcttgatatcaactgttcatcgaacaaccgcgcattcaccttcagggaattggttagctgaggatctgaacaaagcgaaattggattacttctacttcatgctcacaggactcatggttgttaacatggcttacttcttgttgatggctagatggtatagatacaaaggaggtaatgatgaagacatcactgagattgagaccaatgaagaagaaaccaagcaacagcagctacaagacaagaactctgtctga

SEQ ID NO: 2 - protein, 606 aa, Arabidopsis thaliana
MERKPLEVEPSTTTTNTDVVDSFEEEQRKIVYRGWKVMPFIIGNETFEKLGIIGTLSNLLVYLTSVFNLKSYTAATIINAFSGTINFGTFIAAFLCDTYFGRYKTLSVAVIACFLGSFVILLTAAIPSLHPVACGNKISCEGPSVGQILFLLMGLGFLVVGAGGIRPCNLAFGADQFNPKSESGKKGINSFFNWYFFTFTFAQIISLTAVVYIQSNVSWTIGLIIPVALMFLACVIFFAGDRLYVKVKASGSPLAGIARVIAAAIKKRGLKPVKQPWVNLYNHIPSNYANTTLKYTDQFRFLDKAAIMTPEEKLNSDGTASDPWKLCTLQQVEEVKCIVRVIPIWFASTIYYLAITIQMTYPVFQALQSDRRLGSGGFRIPAATYVVFLMTGMTVFIIFYDRVLVPSLRRVTGLETGISLLQRIGAGFTFAIMSLLVSGFIEERRRNFALTKPTLGMAPRTGEISSMSALWLIPQLTLAGIAEAFAAIGQMEFYYKQFPENMKSFAGSIFYVGAGVSSYLASFLISTVHRTTAHSPSGNWLAEDLNKAKLDYFYFMLTGLMVVNMAYFLLMARWYRYKGGNDEDITEIETNEEETKQQQLQDKNSV

SEQ ID NO: 3 - DNA, 1851 bp, Arabidopsis thaliana
  CDS (1)..(1851)
atggagagaaagcctcttgaacttgagtcgacggataaccaccagaatccttcctccgccgtatacggtggctctgttacggcggttgactctgttgaagaagatgttcagaatcagaagaaagtcgtttatagaggctggaaagtcatgccctttattattggaaatgagacatttgagaagcttgggatcattggaacactatcaaaccttctggtttatttaactgcagtcttcaacctgaagagtattacagctgcaaccatcattaacgcctttagtggcacaattaatttcggaactttcgttgctgcttttctctgtgacacttacttcggtcgatacaagactctaagtgtcgcggtcatcgcatgttttcttggatcatttgtgatactattgactgcagcagtgccacaactgcatccagctgcatgtggaacagcggcggatagcatatgtaacgggccaagtggaggccagatagcgtttctactgatgggtctcgggttccttgtagtgggagcgggcggtattagaccgtgtaacttagcttttggggctgatcagtttaacccgaaaagcgaatcagggaaaagagggattgacagtttctttaattggtatttctttaccttcactttcgcgcagatcctgtcgctgactctagtcgtctacgttcagtctaatgtcagttggacgatcggtctaaccatccctgccgttctaatgtttttggcctgcttgattttctttgcgggcgataagttgtatgtgaagatcaaagcctcgggtagtccattggccggtatagctcaagttatagcggttgcgatcaagaaacgcggattaaagcccgcgaaacagccttggcttaacctttacaattactacccaccaaaatacgcaaactccaagctcaaatacacagaccaattcagatttcttgataaagccgctatcttgactcctgaagacaagttgcagccagatggtaagcctgctgatccttggaagctctgtacaatgcaacaagttgaagaagtgaagtgcatcgtgagagtgcttcctatatggtttgcatcatcaatttactacttaaccataactcaacaaatgacttatcccgtcttccaagcccttcagagcgaccgtcgcttaggctcaggaggttttgtgattcccgcagccacctacgtggttttcttgatgacgggaatgacagttttcatcgtagtctacgaccgtgtacttgtgccaaccatgagaagaattactggtctagacaccgggataacgctcttgcagagaattggaactggcattttcttcgctaccgcgagtttagtagtcgcgggatttgtcgaggaacgaaggagaacattcgctctgactaaaccaacactcggtatggcgccaagaaagggagaaatctcgtcgatgtcagctatgtggctgattccgcagctctcactggcgggtgtagcagaggcatttgcagccattggacaaatggagttttactacaagcagtttcccgagaacatgaggagtttcgctggatccatcttttacgttggaggaggagtttcgagttaccttggtagcttcttgattgcaacagttcacaggacaacacagaactcgtcagggggtaactggttagctgaggatttgaacaaaggaagattggatctcttctatttcatgatcgctggaatcctggcagttaattttgcttatttcttggtgatgtcaagatggtataggtacaaaggaagtgatgacgaagtgacaacatatgaaaccaatgaaaatatcatcaaacagcaagacaagaacgttgcctga

SEQ ID NO: 4 - protein, 616 aa, Arabidopsis thaliana
MERKPLELESTDNHQNPSSAVYGGSVTAVDSVEEDVQNQKKVVYRGWKVMPFIIGNETFEKLGIIGTLSNLLVYLTAVFNLKSITAATIINAFSGTINFGTFVAAFLCDTYFGRYKTLSVAVIACFLGSFVILLTAAVPQLHPAACGTAADSICNGPSGGQIAFLLMGLGFLVVGAGGIRPCNLAFGADQFNPKSESGKRGIDSFFNWYFFTFTFAQILSLTLVVYVQSNVSWTIGLTIPAVLMFLACLIFFAGDKLYVKIKASGSPLAGIAQVIAVAIKKRGLKPAKQPWLNLYNYYPPKYANSKLKYTDQFRFLDKAAILTPEDKLQPDGKPADPWKLCTMQQVEEVKCIVRVLPIWFASSIYYLTITQQMTYPVFQALQSDRRLGSGGFVIPAATYVVFLMTGMTVFIVVYDRVLVPTMRRITGLDTGITLLQRIGTGIFFATASLVVAGFVEERRRTFALTKPTLGMAPRKGEISSMSAMWLIPQLSLAGVAEAFAAIGQMEFYYKQFPENMRSFAGSIFYVGGGVSSYLGSFLIATVHRTTQNSSGGNWLAEDLNKGRLDLFYFMIAGILAVNFAYFLVMSRWYRYKGSDDEVTTYETNENIIKQQDKNVA

SEQ ID NO: 5 - DNA, 1764 bp, Arabidopsis thaliana
  CDS (1)..(1764)
atggaggttgagaagacagagaagaacattgcagaggatgatgagtctaagatcatctacagaggatggaaagtcatgcccttcatcattggaaatgagacatttgaaaaattggggattgttggaagttcatcgaatctggttatatacttaacgacggttttcaacatgaagagcatcacggctgcgaaagtcgtcaacatctacggtggcacaagcaactttggcaccatcgtcgctgctttcctctgtgactcctactttggccgctacaagaccctatctttcgccatgatcgcttgctttctcggttcggtggcaatggatctaacggctgtgattcatcccctgcatccagctcaatgcgctaaggaaataggaagcgtgtgcaatgggccatccatcggacaaatcatgtttctcgccggagcaatggttttgctggtgatcggagccggtgggattaggccatgcaatcttccatttggtgctgatcagttcgatccgaagacaaaagaagggaaacgagggattgagagtttcttcaattggtatttcttcaccttcacgtttgctcagatggtgtcgttaaccctcatcgtctatgttcagtcaaacgtgagctggagcattggtttagccatcccagctattctaatgctacttggttgcatcatattcttcgctggttctaagctctatgtcaaggttaaagctagtggcagtcccattcacagcataactcgtgtcattgttgtcgcgatcaagaagaggcggttaaagcccgttgggcctaacgagctttacaactacatcgccagtgatttcaagaactcgaaattgggccatacagagcagttcaggtttcttgacaaatcggcaatccaaacacaagacgacaagctgaacaaagatgggtcgccggtggatgcatggaaactctgcagtatgcaacaagtggaggaagttaaatgcgtgatccgggtgcttccggtttggctctcggccgccttattctacctagcttacattcaacaaacaacctacacaatctttcagtctcttcaatccgatagacgccttggtccaggaagtttccagatcccggccggttcttataccgtcttcctaatgcttggaatgacgatattcatacctatctatgaccgcgtccttgtacctttccttagaaagtatacaggcagagacggcggtatcacacaactgcagagagttggagcaggactgtttctatgcatcacaagtatgatggtgtctgcaattgtagaacaatacagaagaaaggtagctctcacaaaaccgacgctagggttggccccaagaaaaggcgcaatctcttcgatgtccggtatgtggttgattcctcagctagtgctaatgggtatcgcggacgccctcgctggagttggacaaatggagttttactacaaacagtttccagagaacatgcgaagttttgctggttctctgtattattgtggaatcggattggcgagttacctcagcacctttttgttatcggcggtacacgataccacagagggattttcaggaggaagttggcttccggaagatttaaacaagggaagattggagtatttctacttcttggttgctggtatgatgactctaaacttggcctatttcttgttggtctcacattggtaccgttacaaagatgttgtggccaaggacaaggacatggacaagacttctgctgagtttgataaggtgtcagtgtaa

SEQ ID NO: 6 - protein, 587 aa, Arabidopsis thaliana
MEVEKTEKNIAEDDESKIIYRGWKVMPFIIGNETFEKLGIVGSSSNLVIYLTTVFNMKSITAAKVVNIYGGTSNFGTIVAAFLCDSYFGRYKTLSFAMIACFLGSVAMDLTAVIHPLHPAQCAKEIGSVCNGPSIGQIMFLAGAMVLLVIGAGGIRPCNLPFGADQFDPKTKEGKRGIESFFNWYFFTFTFAQMVSLTLIVYVQSNVSWSIGLAIPAILMLLGCIIFFAGSKLYVKVKASGSPIHSITRVIVVAIKKRRLKPVGPNELYNYIASDFKNSKLGHTEQFRFLDKSAIQTQDDKLNKDGSPVDAWKLCSMQQVEEVKCVIRVLPVWLSAALFYLAYIQQTTYTIFQSLQSDRRLGPGSFQIPAGSYTVFLMLGMTIFIPIYDRVLVPFLRKYTGRDGGITQLQRVGAGLFLCITSMMVSAIVEQYRRKVALTKPTLGLAPRKGAISSMSGMWLIPQLVLMGIADALAGVGQMEFYYKQFPENMRSFAGSLYYCGIGLASYLSTFLLSAVHDTTEGFSGGSWLPEDLNKGRLEYFYFLVAGMMTLNLAYFLLVSHWYRYKDVVAKDKDMDKTSAEFDKVSV

SEQ ID NO: 7 - DNA, 1668 bp, Arabidopsis thaliana
  CDS (1)..(1668)
atggacaatgagaaagggacaagttcctcggatttaacgacgagacaaaggaagcctcttggttggaaagcgatgccttatatcatagggaatgaaacattggagaggcttgccacattcggtttgatggcgaatttcatggtgtatatggtaagagagtatcatatggaccaagttcaagctgtcactcttatcaacacttggtctgctctcaccaactttgctcctatcatcggagctttcatctccgactcctacaccggaaaatttaataccattgtcttcggttccatcgctgagttgttgggcatgttggtgttgactttcacgtctctggtccctaatctacgaccaccaccttgcactgccgaccaaatcactggacaatgtattccctatagctattcgcagttatacgttttactctcaggacttttcttgttatcagttggaacaggtggaatccggtcatgcagtgttcctttcagtctcgatcagttcgatgattcgactgaagaaggaagagaaggaagtagaagcttctttagctggtactataccactcatacaatcgtccagttagtttcaatgacactagtgttgtacgtacagaacaacatcagttggggcattggattcgcaatcccgaccgttctcaatttttttgcgcttcttctgctttttgtgggtactcggtattatgtctttgtcaaacccgaaggaagtgtcttctctggagttttcaaggttcttgtggctgcttataagaaacgcaaggcacggtttacttctggaattgactaccatcaacccttactagagacagatttacaatcaaataaactcgtactcactgatcaattcagattcttgaacaaagctgtgatagtgatgaacaatgatgaagctggaaatgaggagtggagaacctgcacagtgagacagatagaggacatcaagtcaataatcagtattattccaatatttgcttcgagcattattggatttttggctatgaaccaacaacagacgtttacagtctcacaagcactaaaaatggacctccaatttccaggcacttcttacctaatccctcctgcttctataaccgtcatatcattattaaacataggtatatggcttcccttctatgaaaccgttttggtccgacacatcgaaaacattacaaaacaaaacggaggtatctcgttactacaaaaagtcggcattgggaatattttctccatctcgacgatgctcatatccggtattgtggagcgaaagagaagagatttatcgcttaatggagtaaaaatgtcggttttctggctaaccccgcaacaagtactaatgggattttatcaagtcttcacgattgttggtctcaccgagttcttcaacaaacaagttccaatcaacatgagaagcattgggaactcgttgctttacttaggtttgtctctagccagttatctaagcagtgccatggtgagcattgttcatagtgtgactgctcgtggaggacagagttggctaacggatgatattgacaaaagcaagttggattgtttctattactttattgccgctttaagcactcttaatttcatcttcttcttctggtgtgctcgaaggtatcgttacagaaactatagtaatgaacaataa

SEQ ID NO: 8 - protein, 555 aa, Arabidopsis thaliana
MDNEKGTSSSDLTTRQRKPLGWKAMPYIIGNETLERLATFGLMANFMVYMVREYHMDQVQAVTLINTWSALTNFAPIIGAFISDSYTGKFNTIVFGSIAELLGMLVLTFTSLVPNLRPPPCTADQITGQCIPYSYSQLYVLLSGLFLLSVGTGGIRSCSVPFSLDQFDDSTEEGREGSRSFFSWYYTTHTIVQLVSMTLVLYVQNNISWGIGFAIPTVLNFFALLLLFVGTRYYVFVKPEGSVFSGVFKVLVAAYKKRKARFTSGIDYHQPLLETDLQSNKLVLTDQFRFLNKAVIVMNNDEAGNEEWRTCTVRQIEDIKSIISIIPIFASSIIGFLAMNQQQTFTVSQALKMDLQFPGTSYLIPPASITVISLLNIGIWLPFYETVLVRHIENITKQNGGISLLQKVGIGNIFSISTMLISGIVERKRRDLSLNGVKMSVFWLTPQQVLMGFYQVFTIVGLTEFFNKQVPINMRSIGNSLLYLGLSLASYLSSAMVSIVHSVTARGGQSWLTDDIDKSKLDCFYYFIAALSTLNFIFFFWCARRYRYRNYSNEQ

SEQ ID NO: 9 - DNA, 1863 bp, Arabidopsis thaliana
  CDS (1)..(1863)
atggttttggaggatagaaaggacggttcttctttgccgggacgatccggtagtttctctaaatcgtcaccgtcggagttggatgttgttgatccctacaagcggataagttcgccgggatctatattggatgctgagaaggtagagaaaaagcctggaggatggagagccgtctcgttcattttaggaaatgagacgctggagagactgggatcgataggattgttggcaaacttcatggtttatctaaccaaagtgtttcacttagaacaagtcgacgctgcaaatgtcatcaacatttggtcaggtttcaccaatctcactcctctcgtcggagcgtatatctcagacacttatgttggccgcttcaagaccatcgctttcgcctcattcgccactctcctcggactaataacaattacactcacagcatcgtttcctcaactccacccagcatcatgcaacagccaggacccactcagttgcggcggtccgaataagctccagatcggagttttgctattgggactctgtttcctctccgtagggagtggaggaatacgaccttgtagcatcccttttggggttgatcagtttgaccaacgaactgaggaaggggttaaaggagtggccagtttcttcaactggtattacatgactttcactgtggttctgatcattacacagaccgtagttgtgtatatccaggatcaagtcagttggattatcggttttagtatccctaccggactcatggctcttgcggttgttatgttttttgccggaatgaagcgttatgtctacgttaaaccagaaggaagtatattctctgggatcgctcaagttatcgtggcagctcgtaagaagcgaaagctgaaacttccggcggaagatgacggcactgtcacctattacgacccagccatcaagtctagcgtgttatccaagttacaccgcagtaaccaattcaggtgtcttgacaaagccgcggtggttatagaaggtgacctaacacccgagggacctcccgcagacaagtggcggttatgcagcgtccaagaagtggaagaagtgaagtgtttgatccgaattgttcctatctggtcggccggaataatctcactcgcggccatgacaacacaaggcactttcacggtctctcaagctttgaaaatggatcgaaacttaggtcctaaattcgagattccggctggttcactctccgtcatctctctcctcacaatcggcatctttcttcccttctacgaccgcgtttttgtaccattcatgcggcgaatcaccggccataaatccggaatcacactcctccaaaggataggaacagggatcgttttcgcgatcttttctatgatcgttgcgggcattgtggagcgtatgagacgcatacgctccatcaatgccggagatccaacgggaatgactccaatgtcggtgttttggctttcgccgcagctaattctcatgggactatgtgaagcattcaatatcatcggacaaattgagttcttcaacagtcagtttccagagcacatgagaagtatcgctaactctctcttctctttatcgttcgccggttcgagctaccttagtagtttccttgtgactgtcgttcataaattctccggtgggcatgatcgtccggattggctaaacaagaatctcaacgcgggaaaattggattacttctattatctgattgcggttttgggtgtggttaatctggtttacttttggtattgtgctcggggataccggtacaaggtcggtttaccgattgaagactttgaggaggacaagtcctccgatgatgttgagatgacttcgaagaaatcgatgaaatga

SEQ ID NO: 10 - protein, 620 aa, Arabidopsis thaliana
MVLEDRKDGSSLPGRSGSFSKSSPSELDVVDPYKRISSPGSILDAEKVEKKPGGWRAVSFILGNETLERLGSIGLLANFMVYLTKVFHLEQVDAANVINIWSGFTNLTPLVGAYISDTYVGRFKTIAFASFATLLGLITITLTASFPQLHPASCNSQDPLSCGGPNKLQIGVLLLGLCFLSVGSGGIRPCSIPFGVDQFDQRTEEGVKGVASFFNWYYMTFTVVLIITQTVVVYIQDQVSWIIGFSIPTGLMALAVVMFFAGMKRYVYVKPEGSIFSGIAQVIVAARKKRKLKLPAEDDGTVTYYDPAIKSSVLSKLHRSNQFRCLDKAAVVIEGDLTPEGPPADKWRLCSVQEVEEVKCLIRIVPIWSAGIISLAAMTTQGTFTVSQALKMDRNLGPKFEIPAGSLSVISLLTIGIFLPFYDRVFVPFMRRITGHKSGITLLQRIGTGIVFAIFSMIVAGIVERMRRIRSINAGDPTGMTPMSVFWLSPQLILMGLCEAFNIIGQIEFFNSQFPEHMRSIANSLFSLSFAGSSYLSSFLVTVVHKFSGGHDRPDWLNKNLNAGKLDYFYYLIAVLGVVNLVYFWYCARGYRYKVGLPIEDFEEDKSSDDVEMTSKKSMK

SEQ ID NO: 11 - DNA, 1731 bp, Arabidopsis thaliana
  CDS (1)..(1731)
atgggagttgttgagaatcggaaaattttgccagagaaaaaacttggaggctggagagccattacgttcatcctaggtaatgagacgttggagaagttaggatcgattggagtatcagcaaattttatgttgtatttgaggaatgtgtttcacatggagccagtagaagcttttaacgtatactacttgtggatgggtctcactaactttgctccactcctcggcgcattaatctccgacgcctacattggccgtttcaagaccatcgcttacgcatccctcttctcaattctaggactaatgacggtgacactcaccgcctgcctgcctcaactccacccaccaccgtgcaacaaccctcatccagacgaatgcgacgatccgaacaagctccagctcgggattctattcctcggtctcggctttctctccatcggtagcggcggaatccggccttgcagcattccattcggagttgatcagtttgaccaacgaacagagcaaggccttaaaggagtggccagtttctttaattggtactacttgaccttaactatggttctcatcttttcgcataccgttgtggtctacttacagactgtcagttgggtcatcgggtttagcatcccgactagtttaatggcttgtgcagtggttctgttctttgtcggtatgcggttttacgtatatgtcaaaccggaaggtagtgtattctctggtattgctcgggtcatcgtggcagctcgtaagaaacgggacctcaaaatttcgcttgtggacgatgggactgaggagtattatgagccgccggtgaaacctggcgtgttatccaagttacctcttactgaccaattcaagtttctggacaaagctgcggtgatactagacggtgatcttacatctgaaggagttccggcaaataagtggcggctatgtagcatccaagaagttgaagaggtcaagtgcctgatcagagttgttccggtttggtctgctggaataatttcaatcgttgcaatgaccacgcaagcaactttcatggtctttcaagctacaaaaatggatcgacacatgggtccacactttgagatcccggccgcctccataaccgtcatttcttacatcactataggcatttgggtgcctatctacgaacacctcttagtcccgttcctttggcgaatgagaaagttcagggtcactctccttcaacggatggggatagggatcgtcttcgccattctctccatgttcactgcagggtttgtagagggagtgaggcggacacgggctactgaaatgactcaaatgtcggtgttttggctggctttgccactgattctgatggggctctgcgagtcatttaatttcattggactgatcgagttcttcaacagtcagtttccagagcacatgagaagcatagcgaattcgctatttccactctcatttgctgcagctaattatctgagcagtctgctggtgaccaccgtgcataaagtctcaggcacaaaagaccaccctgactggctgaacaaggaccttgatagagggaagttggactacttctactatctgattgccgttttgggtgtggttaaccttgtgtatttctggtactgtgcccatagataccagtataaagccggttcgcaaattgaagatttcaatgaggagaagtctcttctagacatcgaaccaaaccagagacacgatcaatctccaagttag

SEQ ID NO: 12 - protein, 576 aa, Arabidopsis thaliana
MGVVENRKILPEKKLGGWRAITFILGNETLEKLGSIGVSANFMLYLRNVFHMEPVEAFNVYYLWMGLTNFAPLLGALISDAYIGRFKTIAYASLFSILGLMTVTLTACLPQLHPPPCNNPHPDECDDPNKLQLGILFLGLGFLSIGSGGIRPCSIPFGVDQFDQRTEQGLKGVASFFNWYYLTLTMVLIFSHTVVVYLQTVSWVIGFSIPTSLMACAVVLFFVGMRFYVYVKPEGSVFSGIARVIVAARKKRDLKISLVDDGTEEYYEPPVKPGVLSKLPLTDQFKFLDKAAVILDGDLTSEGVPANKWRLCSIQEVEEVKCLIRVVPVWSAGIISIVAMTTQATFMVFQATKMDRHMGPHFEIPAASITVISYITIGIWVPIYEHLLVPFLWRMRKFRVTLLQRMGIGIVFAILSMFTAGFVEGVRRTRATEMTQMSVFWLALPLILMGLCESFNFIGLIEFFNSQFPEHMRSIANSLFPLSFAAANYLSSLLVTTVHKVSGTKDHPDWLNKDLDRGKLDYFYYLIAVLGVVNLVYFWYCAHRYQYKAGSQIEDFNEEKSLLDIEPNQRHDQSPS

SEQ ID NO: 13 - DNA, 2474 bp, Brassica napus
  CDS (1)..(151)
  CDS (619)..(836)
  CDS (928)..(1481)
  CDS (1562)..(2471)
atggagagaaagccctttgatgttgagacaactgaggatcacaaactctacccctccgtcgatggcggtggttctgattcggtcgattcatttgaagacgagcagaaaaagctcgtttatagaggctggaaagtcatgccctttatcattggtaacgctttcttcttctcttcagacaactttttttttagtttattctgttttgttttgttgtgtctcttttgtcggattatagaacgttttgcccgtgatgtttttattttaatttcgtttcttttgtcttcttagacttgactgttgaaaatcttgatttggagttcttgtcttgacgtttcgagattattgaaacacagatcaaccaaaccagttgagtttcctagataaatctaccatggaaagtgagagactttgaatcatgcaagttttaagtttctgaaataagattttagttagtttctgggagttataacagttaaagaatgaatgaatgaataaagtgtccagtccaccactgaaagtccaattctttgatttcaacattgtgaattaaatgtaaaaaggttgttactttatggtttgactaattatttatgttgaaaaaaatatattgtgtcacaggtaatgagacatttgagaagatagggatcattgggacactatcaaaccttctggtgtacctaacttcagtattcaaccttaagagtgttacagctgcaaccatcatcaacgccttcagtggcactatcaacttcggcactttccttgctgctttcctctgcgacacttactttggtcgctacaagactctctctgttgctgtcatcgcctgttttctggtactctaatcaaatgaccatcttgttttattttggccaagattttgtctttttttttttattactaaaccatatttcatatttcttgtagggatcgcttgtgatactactgacggctgcagttccaggattgcaccccattccttgtggaacacagagttcttgccaaggcccaagcgagggccagattgcgtttcttctgatgggtttagcgcttcttgtggtgggtgctggtggaattaggccgtgtaacttggcctttggtgctgaccagttcaaccccaagtcagaatctggaaagaaaggaatcaacagtttcttcaactggtacttcttcactttcactttcgcgcagatcatctctctcacgctagttgtgtatatccagtcaaatgtgagctggaccatcggtttgagtatccctgtgggtcttatgttcttggcctgcgtcatcttctttgctggtcataaactgtatgtgaaagtgaaagcctctggtagtccattggctggtataggtcatgttatagccgcagcgatcaagaaacgtggcttgaagccagttaagcagccttggatcgatctttacaaccacattcctcataactatgcaaactctactcttaagtacaccgaccagctaaggtaaagtcggaatagttctgtctctgtctttctttgttcatttgctttatgctttgtgtgaacaaatgttgtattgccaggtttctagacaaagcagcgattatgaccgctgaggacaagttgaactcggatggaacggcttcggatccatggaaactatgtacgatgcagaaagtggaagaagtgaaatgcattttaagagtgattccaatctggttcgcatgcgccatttactaccttgcaataagtatgcaaatgacttatccagtcttccaagcgcttcagagcgacaggcgattaggttcaggtggcttcaagattccagccgccacctatgtcgtgttcttgatgtctggtatgacggttttcatcataatctacgaccgtgtcctcgtcccctcgctcaaaagagtgaccggtctagacacggggataacactcttacaaagaataggagctggcattttctttgcggtgttgagtttattggtctccgggttcatagaggaacgtagaagaacctttgcgctgacacgacctacgctggggtcggagcctcgaacaggagagatctcctcaatgtcagggatgtggctgattccgcagctggtgcttgcaggggtagcagaagcttttgcagccattgggcaaatggagttttactacaagcagtttcctgaaaacatgaagagctttgcgggttctatcttctatgtcggtggaggagtttctagctacctcgctagcttcttgatctcgactgttcatagaacaactgagcattcacctacggggaattggttagctgaggatctgaacaaagcgaagctggactacttctatttcatgctcacaggactcatgtttgttaactttctttacttcttgttaatggctagatggtatagatacaaaggcactcatgatgaagtcagttatgtggttgacactgttgacgaagagacaaagcaacaagacaagaactctgtctga

SEQ ID NO: 14 - protein, 611 aa, Brassica napus
MERKPFDVETTEDHKLYPSVDGGGSDSVDSFEDEQKKLVYRGWKVMPFIIGNETFEKIGIIGTLSNLLVYLTSVFNLKSVTAATIINAFSGTINFGTFLAAFLCDTYFGRYKTLSVAVIACFLGSLVILLTAAVPGLHPIPCGTQSSCQGPSEGQIAFLLMGLALLVVGAGGIRPCNLAFGADQFNPKSESGKKGINSFFNWYFFTFTFAQIISLTLVVYIQSNVSWTIGLSIPVGLMFLACVIFFAGHKLYVKVKASGSPLAGIGHVIAAAIKKRGLKPVKQPWIDLYNHIPHNYANSTLKYTDQLRFLDKAAIMTAEDKLNSDGTASDPWKLCTMQKVEEVKCILRVIPIWFACAIYYLAISMQMTYPVFQALQSDRRLGSGGFKIPAATYVVFLMSGMTVFIIIYDRVLVPSLKRVTGLDTGITLLQRIGAGIFFAVLSLLVSGFIEERRRTFALTRPTLGSEPRTGEISSMSGMWLIPQLVLAGVAEAFAAIGQMEFYYKQFPENMKSFAGSIFYVGGGVSSYLASFLISTVHRTTEHSPTGNWLAEDLNKAKLDYFYFMLTGLMFVNFLYFLLMARWYRYKGTHDEVSYVVDTVDEETKQQDKNSV

SEQ ID NO: 15 - DNA, 2668 bp, Brassica napus
  CDS (1)..(160)
  CDS (665)..(882)
  CDS (975)..(1528)
  CDS (1753)..(2665)
atggaaagaaagccttttgaggttgagacaacaaagacggatgaggatcagaaaccctactccgctgtcgatggcggtggttctgattcggtcgattcatttgatgaagatcagaaaaagctcgtgtatagaggatggaaagtcatgccttttatcattggtaacgcttattttcttctctattcagacactccttttttattttattgtgtgtctgcttctctcaacacggtccagaaactaaataaagatgtggaaaataaactagaacatgttgtccgtgaaatttaaaaagtacttttcttttctcttcttctctttgactgaaaacgattgaaaccaggatcaaccaaatctaccagatctagagaaaggtgttattacaactttttttcattaataatgctttttaatttttagttttatacgcttaaagacaaagttatttagtttctgggagttacagcagttaaaagttaaaacaaaaggaataaagtttcaagttaaagaagcactgaaagtacaacttcgattcgtgtgtgtttcggtttaaaagttgtgaattaaaaagtttgttactgtatgggaaacccgtttttccctttgactactgattcatttattgtgaaaaagaaattaataatgattcttgttctttttacaggtaatgaaacatttgagaagattgggatcattgggacattatcaaaccttcttgtgtacctaactcaagtattcaacctcaagaaatacacagctgcaaccatcatcaatgcctttagtggcaccatcaacttcggcactttcctcgctgctttcctctgcgacacttactttggtcgctacaagactctcagtgttgctgtcatcgcttgttttctggtacctactaatgctgttcttaacggttttgtttttcgtcatgactcttattctttttttctttttgctaaaccgtgttttatcttttgtagggatcgcttgcgatactactcacggcagcagttccgggactgcacccgactccttgtggaacaaagagttcatgcgaagggccaggtgcggggcagattttgtttctgatgttgggtttagcgcttcttgtggttggtgctggtggtatcaggccgtgtaacttggcgtttggtgccgatcagttcaaccccaagtccgaatcaggaaagaaaggaatcaacagtttcttcaactggtacttcttcactttcacgttcgcgcagatcatctcgctcacgctagttgtgtatatccagtcgaatgtgagctggaccatcggtttgagtatccccgtgggtctcatgttcttggcttgcgtcattttcttcgctggtcataaactttatgtaaaagtgaaagcctcgggtagtcccttggctggtatagctcgtgttatagcagccgcgatctcgaaacgaggattgaagccggttaagcagccttgggtcgatctttacaatcacattcctcgtaactatgcaaacttaaccctaaaatacaccgaccagttcaggtatactcaatagttctgtctctattgctttatatcttggcacagccggatggatgccttgacttctaaatatttttaaaatgggtcgtatagacccaccccaggttgtcaaattttgtttaccgaaatatatattttttatttaccaaaatatttttaaaatgggcccggttggaaacaaaatgctgaaaactaaatgttggttttgtttgttatattgttaggtttctagacaaagcagcgataatgacacctgaggacaagttgaactctgatggaacagcttcggatccatggaaactatgtacgatgcagcaagtggaagaagtgaaatgcattataagagtgattccgatctggtttgcttgcgctatctactaccttgcaataagcattcaaatgacttatcccgtcttccaagcgcaacagagcgacaggagattaggtaccggtggcttcaagatccccgcagccacctacgtagttttcttgatgaccggtatgacggttttcatcataatctacgaccgtgtccttgtcccgtcgctcaaaagagtgaccggtctagacactggtataacactcttgcaaaggatcggagcggggatcttctttgcggtgttgagtttattggtctccgggttcatagaggaacgtagaagaagcattgcgctgacaaaacagactctagggatggagcctcgaacaggagagatctcatcaatgtcggcgatgtggctgattccgcagctggttcttgcagggatagctgaagcgtttacagccattggacagatggagttttactacaagcagtttcctgagaacatgaggagctttgctggttctatcttctatgtcggtgcgggggtttctagctacctcgctagcttcttgatctccactgttcatcggacaactgaacattcaccttcggggaactggttagctgaggatctgaacaaggccaagttggattacttctatttcatgctcacggggctcatgttcgttaacatggtttacttcttgataatggctaagttttatagatacaaaggcagtgatgataaagtcatctctgctattgagaccagtgaagacgagaccaagcagaagcaagcgaagaactcggtttaa

SEQ ID NO: 16 - protein, 615 aa, Brassica napus
MERKPFEVETTKTDEDQKPYSAVDGGGSDSVDSFDEDQKKLVYRGWKVMPFIIGNETFEKIGIIGTLSNLLVYLTQVFNLKKYTAATIINAFSGTINFGTFLAAFLCDTYFGRYKTLSVAVIACFLGSLAILLTAAVPGLHPTPCGTKSSCEGPGAGQILFLMLGLALLVVGAGGIRPCNLAFGADQFNPKSESGKKGINSFFNWYFFTFTFAQIISLTLVVYIQSNVSWTIGLSIPVGLMFLACVIFFAGHKLYVKVKASGSPLAGIARVIAAAISKRGLKPVKQPWVDLYNHIPRNYANLTLKYTDQFRFLDKAAIMTPEDKLNSDGTASDPWKLCTMQQVEEVKCIIRVIPIWFACAIYYLAISIQMTYPVFQAQQSDRRLGTGGFKIPAATYVVFLMTGMTVFIIIYDRVLVPSLKRVTGLDTGITLLQRIGAGIFFAVLSLLVSGFIEERRRSIALTKQTLGMEPRTGEISSMSAMWLIPQLVLAGIAEAFTAIGQMEFYYKQFPENMRSFAGSIFYVGAGVSSYLASFLISTVHRTTEHSPSGNWLAEDLNKAKLDYFYFMLTGLMFVNMVYFLIMAKFYRYKGSDDKVISAIETSEDETKQKQAKNSV

SEQ ID NO: 17 - DNA, 2354 bp, Brassica napus
  CDS (1)..(154)
  CDS (514)..(731)
  CDS (811)..(1364)
  CDS (1433)..(2351)
atggagagaaagccctttgaggttgagacgacggaggatcacaaaccctactccgatggcggtggttctgatttaacgtcgacggttgattcatctggcgacgagcagaaaaagctcgtttatagaggctggaaagtcatgccttatatcattggtaacgcttttctctctctctctagaccgttatttttaaactctgttttctttttgtcaactaactctgttttttcgtgtaacagaacacttttccccgtgatggtttttttgtcatttaataatttgtttatttttatcttgtcacgttggcttgactgtgtcagtattctagataatctaccaggtgtagtgtatagaaagaaatgttacgttgtgttctttagtaacgtttttaaatgtccgtgaaaaggactttgaatcactggaagtccaatcttggttccaaactgtgttactttatgagaaacccatgttggtttgactattcattaacgaaaagaatttgtatcttgataggtaatgagacatttgagaagattgggatcatagggacattatcaaaccttctagtgtacctaactcaagtattcaacctgaagaaatacacagctgcaactattatcagtgcctttagtggcactatcaacttcggcactttcttcgctgcttttctgtgtgacacttactttggtcgctacaagactctcagtgtggctgtcatcgcttgttttctggtactaatgctgctgatcttaatgggttttttttcttacgccaagaactcttaatgctgatcatttttggtctgtgtagggatcgctttttatactaatgacggctgcagttccgggattgcacccgactccttgtggaactaaaagttcgtgccaagggccaaatggggggcaggttttgtttctgctgttgggtttagcgcttctcgtagtcggtgctggtggtatcaggccgtgtaatttggcctttggagctgatcagttcaaccccaagtcagaatctggaaggaaaggaatcaacagtttcttcaactggtacttcttcactttcacgtttgcgcagatcatctcgctcacgctagttgtgtatatccagtcaaacgtgagctggaccatcggtttgagtatccctgtgggtctaatgttcttggcctgcgtcatttactttgctggccataatctctacgtaaaagtgaaagcctcgggtagtcccttggctggcatcgctcgtgttatagccgcagcgatcaagaaacgagggttgaagcctgttaagaagccttgctccgatctttacaatcacatcccgcctaactatgcaaactctacactcaaatactcggaccagtttaggtaaaactctaagagtttctctctctgttgctttatgtttctgtcttttaacatgtttatgtttctagatttctcgacaaggcagcggtgatgacccctgaggacaagttgaaacccgatggaacggcttcagatccatggaatctatgtacaatgcagcaggtggaagaagtgaaatgcattgtaagagtgattccaatctggttagcttgcgcagtttactacctggcaataacattgcaaatgacttatccggtcttccaagcgctccagagcgaccggagattgggttcaggtggcttcaagattcccggcgccacctatgtagtgttcttgatgtccggtatgacggttttcatcatattctacgaccgtgtccttgtcccgtcgctcagaagagtgacagggctagacaatggtataactctcttacaaagaatcggatcaggcattttcttcgcgcttttgagtttgttggtttctgggttcgttgaggaacggcgaagagccattgcactgacaaaacctactctcgggattgagcctcgagctggagaaatctcatcaatgtcagcgatgtggctgataccgcagctcgtgcttgcagggatagctgaagcttttgcagccgttggacaaatggagttttactacaagcagtttcctgaaaacatgaagagctttgcgggttctatcttctatgttggtgcaggagtttctagctacctcgctagcttcttgatctcgactgttcataaaacaactgagcattcacgctccgggaattggctagctgaggatttgaacaaagggaagctggattacttttatttcatgctcactggcctcatgtttgttaacatggtttacttcttgttaatggctaaattttatagatacaaagtcactaacgatgaagcaaattctgtgattaagaccaatgaagaagagaccaaggagaatcagcaacacgacaagagctatgtctga

SEQ ID NO: 18 - protein, 615 aa, Brassica napus
MERKPFEVETTEDHKPYSDGGGSDLTSTVDSSGDEQKKLVYRGWKVMPYIIGNETFEKIGIIGTLSNLLVYLTQVFNLKKYTAATIISAFSGTINFGTFFAAFLCDTYFGRYKTLSVAVIACFLGSLFILMTAAVPGLHPTPCGTKSSCQGPNGGQVLFLLLGLALLVVGAGGIRPCNLAFGADQFNPKSESGRKGINSFFNWYFFTFTFAQIISLTLVVYIQSNVSWTIGLSIPVGLMFLACVIYFAGHNLYVKVKASGSPLAGIARVIAAAIKKRGLKPVKKPCSDLYNHIPPNYANSTLKYSDQFRFLDKAAVMTPEDKLKPDGTASDPWNLCTMQQVEEVKCIVRVIPIWLACAVYYLAITLQMTYPVFQALQSDRRLGSGGFKIPGATYVVFLMSGMTVFIIFYDRVLVPSLRRVTGLDNGITLLQRIGSGIFFALLSLLVSGFVEERRRAIALTKPTLGIEPRAGEISSMSAMWLIPQLVLAGIAEAFAAVGQMEFYYKQFPENMKSFAGSIFYVGAGVSSYLASFLISTVHKTTEHSRSGNWLAEDLNKGKLDYFYFMLTGLMFVNMVYFLLMAKFYRYKVTNDEANSVIKTNEEETKENQQHDKSYV

SEQ ID NO: 19 - DNA, 2475 bp, Brassica napus
  CDS (1)..(151)
  CDS (620)..(837)
  CDS (929)..(1482)
  CDS (1563)..(2472)
atggagagaaagccctttgatgttgagacaactgaggatcacaaagcctactcctccgtcgatggcggtggttctgattcggtcgattcatttgaagacgagcagaaaaagctcgtttatagaggctggaaagtcatgccctttatcattggtaacgctttcttcttctcttcagacaactttttttttttagtttattctgttttgttttgttgtgtcccttttgtcggattatagaacgttttgcccgtgatgtttttattttaatttcgtttcttttgtcttcttagtcttgactgttgaaaatcttgatttggagttcttgtcttgacgtttcgagatgaatgaaacacagatcaaacaaatcaaccaaaccagttgagtttcctagataaatctaccatggaaagtgagagactttgaatcatgcaagttttcagtttcagatataagattttagttagtttctgggagttataacaaagaatgaataataaagtgtccagtccaacactgaaagtccaatctttgatttcaacattgtgaattaaatgtaaaaaggttgttactttatggtttgactaattatttatgttggaaaaaatatattgtgtcacaggtaatgagacatttgagaagatagggatcattgggacactatcaaaccttctggtgtacctaacttcagtattcaaccttaagagtgttacagctgcaaccatcatcaacgccttcagtggcactatcaacttcggcactttccttgctgctttcctctgcgacacttactttggtcgctacaagactctctctgttgctgtcatcgcctgttttctggtactctaatcaaatgaccatcttgttttattttggccaagattttgtctttttttttttattactaaaccatatttcatatttcttgtagggatcgcttgtgatactactgacggctgcagttccaggattgcaccccattccttgtggaacacagagttcttgccaaggcccaagcgagggccagattgcgtttcttctgatgggtttagcgcttcttgtggtgggtgctggtggaattaggccgtgtaacttggcctttggtgctgaccagttcaaccccaagtcagaatctggaaagaaaggaatcaacagtttcttcaactggtacttcttcactttcacgttcgcgcagatcatctccctcacactagttgtgtatatccagtcaaatgtgagctggaccatcggtttgagtatccctgtgggtcttatgttcttggcctgcgtcattttctttgctggtcacaaactgtatgtgaaagtgaaagcctctggtagtccattggctggtataggtcatgttatagccgcagctatcaagaaacgtggcttgaagccagttaagcagccttggatcgatctttacaaccacattcctcctaactatgcaaactctactcttaaatacaccgaccagcttaggtaaagtcggaatagttctgtctctgtctttctttgttcatttgctttatgctttgtctgaacaaatgttgtattgccaggtttctagacaaagcagcgattatgacccctgaggacaagttgaactcggatggaacggcttcggatccatggaaactatgtacgatgcagaaagtggaagaagtgaaatgcattttaagagtgattccaatctggttcgcatgcgccatttactaccttgcaataagtatgcaaatgacttatccagtcttccaagctctccagagcgacaggctattaggttcaggtggcttcaagattccagccgccacctatgtcgtgttcttgatgtctggtatgacggttttcatcataatctacgaccgtgtccttgtcccctcgctcaaaagagtgaccggtctagacacggggataacactcttacaaagaataggagctggcattttctttgccgtgttgagtttattggtctccgggtttatagaagaacgtagaagaacctttgcgctgacacgacctacgctcgggtcggagcctcgaacaggagagatctcctcaatgtcagcgatgtggctgattccgcagctggtgcttgcaggggtagcagaagcttttgtagccattgggcaaatggagttttactacaagcagtttcctgaaaacatgaagagctttgcgggttctatcttctatgtcggtggaggagtttctagctacctcgctagcttcttgatctcgactgttcatagaacaactgagcattcacctacggggaattggttagctgaggatctgaacaaagcgaagctggactacttctatttcatgctcacaggactcatgtttgtcaactttctttacttcttgttaatggctagatggtatagatacaaaggcactcatgatgaagtcagttatgtggttgacactgttgacgaagagacgaagcaacaagacaagaactctgtctga

SEQ ID NO: 20 - protein, 611 aa, Brassica napus
MERKPFDVETTEDHKAYSSVDGGGSDSVDSFEDEQKKLVYRGWKVMPFIIGNETFEKIGIIGTLSNLLVYLTSVFNLKSVTAATIINAFSGTINFGTFLAAFLCDTYFGRYKTLSVAVIACFLGSLVILLTAAVPGLHPIPCGTQSSCQGPSEGQIAFLLMGLALLVVGAGGIRPCNLAFGADQFNPKSESGKKGINSFFNWYFFTFTFAQIISLTLVVYIQSNVSWTIGLSIPVGLMFLACVIFFAGHKLYVKVKASGSPLAGIGHVIAAAIKKRGLKPVKQPWIDLYNHIPPNYANSTLKYTDQLRFLDKAAIMTPEDKLNSDGTASDPWKLCTMQKVEEVKCILRVIPIWFACAIYYLAISMQMTYPVFQALQSDRLLGSGGFKIPAATYVVFLMSGMTVFIIIYDRVLVPSLKRVTGLDTGITLLQRIGAGIFFAVLSLLVSGFIEERRRTFALTRPTLGSEPRTGEISSMSAMWLIPQLVLAGVAEAFVAIGQMEFYYKQFPENMKSFAGSIFYVGGGVSSYLASFLISTVHRTTEHSPTGNWLAEDLNKAKLDYFYFMLTGLMFVNFLYFLLMARWYRYKGTHDEVSYVVDTVDEETKQQDKNSV

SEQ ID NO: 21 - DNA, 2623 bp, Brassica napus
  CDS (1)..(160)
  CDS (638)..(855)
  CDS (955)..(1508)
  CDS (1708)..(2620)
atggaaagaaagccttttgaggttgagacaacaaagacggatgaggatcagaaaccctactccgccgtcgatggcggtggttctgattcggtcgattcatttgatgaagatcagaaaaagctcgtgtatagaggatggaaagtcatgccttttatcattggtaacgctttttttttttctctattcagacactccgtttttttttttattgtgcgtctgcttttctcaacacggtccagaaactaaataaagatgtgaaaataaactagaacatgtcgtccgtgaattttaaaagtacttttcttttctcttcttctctttgactgaaaacgaatgaaaccaggatcaaccaaatctaccagatctagagaaagagatattacaacttttttcattaataatgctttttaatttttagttttatacgcttaaagacaaagttatttagtttctgggagttacagtaaagtttcaagttaaagaagcactgaaagtacaatcttcgattcgtgtgtgtttcggtttaaaagttgtgaattaaaaagtttgatactttatgggaaacccgttttttctttgacaactgattcatttattgtgaaaaagaaattaataatgattcttgttttttttataggtaatgaaacatttgagaagattgggatcattgggacattatcaaaccttctcgtctacctaactcaagtattcaacctcaagaaatacacagctgcaaccatcatcaatgcctttagtggcaccatcaacttcggcactttcctcgctgctttcctctgcgacacttactttggtcgctacaagactctcagtgttgctgtcgtcgcttgttttctggtaactactaatgctgttcttaacggtttagttttcgtcaagactctattcttttttgtttttttttgtttttgctgaaccgtgttttatctcttgtagggatcgcttgcgatactactcacggcagcagttccgggactgcacccgactccttgtggaacaaaaagttcatgcgaagggccaggtgcgggccagattttgtttctgatgttgggtttagcgcttcttgtggttggtgctggtggtatcaggccgtgtaacttggcgttcggtgccgatcagttcaaccccaagtccgaatcaggaaagaaaggaatcaacagtttcttcaactggtacttcttcactttcacgttcgcgcagatcatctcgctcacgctagttgtgtatatccagtcgaatgtgagctggaccatcggtttgagtatccccgtgggtctcatgttcttggcttgcgtcattttcttcgctggtcataaactttatgttaaagtgaaagcctcgggcagtcccttggctggtatagctcgtgttatagcagcagcgatctcgaaacgaggattgaagccggtcaagcagccttgggtcgatctttacaatcacattcctcgtaactatgcaaacttgaccctaaaatacaccgaccagttcaggtatactcaatagttctgtctctattgctttatatccggatgaaacattcgcctttacttctaaatatttttaaaatgggtcgtatagaccccaagttgtcaaatttgtttaccaaaatatatattttttatttaccaaaatatttttaaaatgggtccggttggaaactaaatgttggtttgttcgttatattgttaggtttctagacaaagcagcgataatgacacctgaggacaagttgaactctgatggaacagcttcggatccatggaaactatgtacgatgcagcaagtggaagaagtgaaatgcattataagagtgattccaatctggtttgcttgcgctatctactaccttgcaataagcattcaaatgacatatcccgtcttccaagcgcaacagagcgacaggagattaggtaccggtggcttcaagatgcccgcagccacctacgtagtgttcttgatgaccggtatgacggttttcatcataatctacgaccgtgtccttgtcccatcgctcaaaagagtgaccggtctagacactggtataacactcttgcaaaggatcggagcgggaatcttctttgcggtgctgagtttattggtctccgggttcatagaggaacgtagaagaagcattgcgctgacaaaacagactctagggatggagcctcgaacaggagagatctcatcaatgtcggccatgtggctgattccgcagctggtgcttgcaggtatagctgaagcatttacagccattggacagatggagttttactacaagcagtttcctgagaacatgaggagctttgctggctctatcttctatgtcggtgcgggggtttctagctacctcgctagcttcttgatctccactgttcataggacaactgaacattcaccttcggggaactggttagctgaggatctgaacaaggcgaagttggattacttctatttcatgctcacgggactcatgttcgttaacatggtttacttcttgataatggctaagttttatagatacaaaggcagtgatgataaagtcatctctgctattgagaccaatgaagacgagaccaagcagaagcaagagaagaactcggtgtaa

SEQ ID NO: 22 - protein, 615 aa, Brassica napus
MERKPFEVETTKTDEDQKPYSAVDGGGSDSVDSFDEDQKKLVYRGWKVMPFIIGNETFEKIGIIGTLSNLLVYLTQVFNLKKYTAATIINAFSGTINFGTFLAAFLCDTYFGRYKTLSVAVVACFLGSLAILLTAAVPGLHPTPCGTKSSCEGPGAGQILFLMLGLALLVVGAGGIRPCNLAFGADQFNPKSESGKKGINSFFNWYFFTFTFAQIISLTLVVYIQSNVSWTIGLSIPVGLMFLACVIFFAGHKLYVKVKASGSPLAGIARVIAAAISKRGLKPVKQPWVDLYNHIPRNYANLTLKYTDQFRFLDKAAIMTPEDKLNSDGTASDPWKLCTMQQVEEVKCIIRVIPIWFACAIYYLAISIQMTYPVFQAQQSDRRLGTGGFKMPAATYVVFLMTGMTVFIIIYDRVLVPSLKRVTGLDTGITLLQRIGAGIFFAVLSLLVSGFIEERRRSIALTKQTLGMEPRTGEISSMSAMWLIPQLVLAGIAEAFTAIGQMEFYYKQFPENMRSFAGSIFYVGAGVSSYLASFLISTVHRTTEHSPSGNWLAEDLNKAKLDYFYFMLTGLMFVNMVYFLIMAKFYRYKGSDDKVISAIETNEDETKQKQEKNSV

SEQ ID NO: 23 - DNA, 2363 bp, Brassica napus
  CDS (1)..(154)
  CDS (516)..(733)
  CDS (812)..(1365)
  CDS (1442)..(2360)
atggagagaaagccctttgaggttgagacgacggaggatcacaaaccctactccgatggaggtggttctgatttaacgtcgacggttgattcatctggcgacgagcagaaaaagctcgtttatagaggctggaaagtcatgccttatatcattggtaacgcttttctctctctctctagaccgttatttttaaactctgttttctttttgtcaactaactctgttttttcgtgtaacagaacacttttccccgtgatgggtttttttgtcatttaataattttgtttatttttatcttgtcacgttggcttgactgtgtcagtgttctagataatctaccaggtgtagtgtacagaaagaaatgttaccttgtgttctttagtaacgtttttaaatgtctgtgggaaggactttgaatcactggaagtccaatcttggttccaaactgtgttactttatgagaaacccgtgttggtttgactattcattaacgaaaagaatttgtatcttgataggtaatgagacatttgagaagattgggatcatagggacattatcaaaccttctagtgtacctaactcaagtattcaaccttaagaaatacacagctgcaactattatcaatgcctttagtggcactatcaacttcggcactttcttcgctgcttttctgtgtgacacttactttggccgctacaagactctcagtgtggctgtcatcgcttgttttctggtactaatgctgctgatcttaatgggttttttttcttacgccaagactcttaatgctgatcatttttcgtctgtgtagggatcggtttttatactaatgacggctgcagttccgggattgcacccgactccttgtggaactaaaagttcgtgccaagggccaaatggggggcaggttttgtttctgctgttgggtttagcgcttctcgtagtcggtgctggtggtatcaggccgtgtaatttggcctttggagctgatcagttcaaccccaagtcagaatctggaaagaaaggaatcaacagtttcttcaactggtacttcttcactttcacgtttgcgcagatcatctcgctcacgctagttgtgtatatccagtcaaacgtgagctggaccattggtttgagtatccctgtgggtctaatgttcttggcctgcgtcatttactttgctggccataatctctacgtaaaagtgaaagcctcgggtagtcccttggctggcatcgctcgtgttatagctgcagcgatcaagaaacgagggttgaagcctgttaagaagccttgctccgatctttacaatcacatcccgcctaactatgcaaactctacactcaaatactccgaccagtttaggtaaaattcaaaaagtttctctctctctctctgttgctttatgttttgttttgatgaaaacatgttatgttgctagatttctcgacaaagcagcagtcacgacccctgatgacaagttgaaacccgatggaacggcttcagatccatggaatctatgtacgatgcagcaggtggaagaagtgaaatgcattgtaagagtgattccaatctggtttgcttgcgcggtttactacctcgcaataacattgcaaatgacttatccggtcttccaagcgctccagagcgaccggagattgggttcaggtggcttcaagattccaggcggcacctatgtagtgttcttgatgtccggtatgacggttttcatcatattctacgaccgtgtccttgtcccgtcgctcagaagagtgacagggctagacaatggtataactctcttacaaagaatcggatcaggcattttctttgcgcttttgagtatgttgatttctgggttcgttgaggaacggcgaagagccattgcactgacaaaacctactctcgggatcgagcctcgagctggagaaatctcatcaatgtcagcgatgtggctgataccgcagctcgtgcttgcagggatagctgaagcttttgcagctgttggacaaatggagttttactacaagcagtttcctgaaaacatgaagagctttgcgggttctatcttctatgtcggtgcaggagtttctagctacctcgctagcttcttgatctcgactgttcataaaacaactgagcattcacgctccgggaattggctagctgaggatctgaacaaagggaagctggattacttttatttcatgatcactggcctcatgtttgtcaacatgggttacttcttgttaatggctaaattttatagatacaaagtcactaacgatgaagcaaattctgtgattaagaccaatgaagaagagaccaaggagaatcagcaacaagacaagagctatgtctga

SEQ ID NO: 24 - protein, 615 aa, Brassica napus
MERKPFEVETTEDHKPYSDGGGSDLTSTVDSSGDEQKKLVYRGWKVMPYIIGNETFEKIGIIGTLSNLLVYLTQVFNLKKYTAATIINAFSGTINFGTFFAAFLCDTYFGRYKTLSVAVIACFLGSVFILMTAAVPGLHPTPCGTKSSCQGPNGGQVLFLLLGLALLVVGAGGIRPCNLAFGADQFNPKSESGKKGINSFFNWYFFTFTFAQIISLTLVVYIQSNVSWTIGLSIPVGLMFLACVIYFAGHNLYVKVKASGSPLAGIARVIAAAIKKRGLKPVKKPCSDLYNHIPPNYANSTLKYSDQFRFLDKAAVTTPDDKLKPDGTASDPWNLCTMQQVEEVKCIVRVIPIWFACAVYYLAITLQMTYPVFQALQSDRRLGSGGFKIPGGTYVVFLMSGMTVFIIFYDRVLVPSLRRVTGLDNGITLLQRIGSGIFFALLSMLISGFVEERRRAIALTKPTLGIEPRAGEISSMSAMWLIPQLVLAGIAEAFAAVGQMEFYYKQFPENMKSFAGSIFYVGAGVSSYLASFLISTVHKTTEHSRSGNWLAEDLNKGKLDYFYFMITGLMFVNMGYFLLMAKFYRYKVTNDEANSVIKTNEEETKENQQQDKSYV

SEQ ID NO: 25 - DNA, 2374 bp, Brassica napus
  CDS (1)..(157)
  CDS (499)..(716)
  CDS (812)..(1365)
  CDS (1465)..(2371)
atggagagaaagcctctagaagtcgagtcaacggatcaccaaaagcctccctccgccgtgtacgatggctctgttatggcggttgattctgttgaggaagaagttgaggagaccaaagtcgtttacagaggctggaaagtcatgccctttatcattggtaacacaaactttttttttataaactttcttcttttgttccaagaacttttttttttaattgcttttcatgtttttttccaaaataaataatcaatagttgaagaaatgaagaggaaaacatcagtcttgcttgaagacttattggtttgatttaaaaaaaaaaaatcgtgagattctctgtactgttgtcaaaagctttgacttagtcaaccagttttttaagaaaattaaaaaaaagagagtgagatctagaatttgagaaggtttcagaacataactttgaggcatatgagatcaaagtcttatgatcatcttggttttgtttgttggtattatcaggaaatgagacgtttgagaagcttgggatcattggaacactatcaaaccttctggtttatttaactgctgtcttcaacatgaagagtatcacagctgcaacaatcatcaatgcattcagtggcacaatcaacttcggaaccttcgttgctgctttcctctgcgacacttacttcggtcgatacaagactctaactgtcgctgtcatcgcctgttttcttgtaatgatcattcctttgcaatctttcttgctccacaagcgttcttagtttaacaaccctaaaaatctgataattgttgttctttttttttgtagggatcacttgtgatactattgacagctgcagtgccacaattacatccagctccatgcggaacagctctctcatgtatcgggccaagtggtggccagatagcgtttctactgctgggtctcgggtttcttgtagttggagcaggcgggattagaccatgtaatctagctttcggggctgatcagtttaaccccaagagcgagtcaggaaaacgaggcatcgatagtttcttcaattggtacttcttcaccttcacgttcgcgcagatcctgtcgctgacactaatcgtctatatccagtccaatgtcagctggacaatcggtttaaccatcccggtcgttctcatgttcttggcctgcgtgattttctttgctggagataagttgtatgtgaagatcaaagcctcaggtagtccattggctggtatagctcaagttatagcggttgcaatcaagaaacgtgggttaaagccaacgaaagagccttggcttaacctttacaactactacccaccaaaatacgcaaactccaaactcaaatacaccgaccagtttaggtaacaaaacacacacacgccaagagttagttttatatttaatatcatatctttccacttttgttttatggttactgaggaagtttcctgtttcggcaggttccttgataaggcggcgattttggctcccgaagacaagttggaggctgatggtaagcctgcggatccctggaagctttgtacaatgcaacaagttgaagaagtgaagtgcattgtgagagtgcttcctatatggtttgctgcatcgatctattacttgaccatcacgcaacaaatgacttaccccgtcttccaagccctccagagcgaccgtcgcttaggatccagaggatttgtgatcccggcagccacctacgttgtctttttgatgacaggaatgacggttttcatcatattctacgaccgtgtcctcgtgcctaccttaagaagaataaccggtatagacacggggataacgctactgcagaggattggaaccggaattttcttcgcctttgttagcttgatagtctccggtttcgtcgaggaacggaggagaacgttcgcgctgactaaaccaacacttggtatggctccaaggaagggagaaatctcctcaatgtcagctatgtggctgatcccacaactcgcccttgcgggtatagctgaggcgtttggagctataggacagatggagttttactacaagcagttccctgagaacatgaggagttttgctggttcgatcttctatgtaggagcaggagtttcgagttacctcggtagcttcttgattgcaatggttcacaggacgacgcagaactcagctggtggtaattggttggctgaggatttgaacaaaggaagattggattacttctatttcatgatcgctggaatcttggcagttaattttgcttacttcttggtcatgtcaagatggtatagatacaaaggaagtgatggtgaagtgacaacttatgaaaccaatggagatgccatcaaacaacaagacaagaatactgtctga

SEQ ID NO: 26 - protein, 612 aa, Brassica napus
MERKPLEVESTDHQKPPSAVYDGSVMAVDSVEEEVEETKVVYRGWKVMPFIIGNETFEKLGIIGTLSNLLVYLTAVFNMKSITAATIINAFSGTINFGTFVAAFLCDTYFGRYKTLTVAVIACFLGSLVILLTAAVPQLHPAPCGTALSCIGPSGGQIAFLLLGLGFLVVGAGGIRPCNLAFGADQFNPKSESGKRGIDSFFNWYFFTFTFAQILSLTLIVYIQSNVSWTIGLTIPVVLMFLACVIFFAGDKLYVKIKASGSPLAGIAQVIAVAIKKRGLKPTKEPWLNLYNYYPPKYANSKLKYTDQFRFLDKAAILAPEDKLEADGKPADPWKLCTMQQVEEVKCIVRVLPIWFAASIYYLTITQQMTYPVFQALQSDRRLGSRGFVIPAATYVVFLMTGMTVFIIFYDRVLVPTLRRITGIDTGITLLQRIGTGIFFAFVSLIVSGFVEERRRTFALTKPTLGMAPRKGEISSMSAMWLIPQLALAGIAEAFGAIGQMEFYYKQFPENMRSFAGSIFYVGAGVSSYLGSFLIAMVHRTTQNSAGGNWLAEDLNKGRLDYFYFMIAGILAVNFAYFLVMSRWYRYKGSDGEVTTYETNGDAIKQQDKNTV

SEQ ID NO: 27 - DNA, 2371 bp, Brassica napus
  CDS (1)..(157)
  CDS (525)..(742)
  CDS (834)..(1387)
  CDS (1462)..(2368)
atggagagaaagcctctggaagttgagtccaccgatcatcagaaaccttcctccgccgtgtacgacggctctgctacggcggttgattctgttgaagaagaagttcaggaaaccaaactcgtttatagaggctggaaagtcatgcctttcatcataggtaacgcatatgtttttaaacatattaaaaatataaatttttgataaaaaaataaatcattttctttgattggtatatttccaaagttttagaaactatatttctagaaatttcctgtaattaaattttgacaattttcttctctgtttctagaaactatattttgttgctttgattttatcattctttgtgttgttgtcttaagctttgacttagtcaaacagtaatttaacccaaaagagtgagatcttgagtttgaagatgtttcagaacacataaatgatcaagaatctcttgtttgattcttcgtttggttgctaaggtcaaagtcttatgatcttttcttcttgcatgttgttattaccaggaaacgagacatttgagaagcttgggatcattggaacactatcaaaccttctggtttacttaactgctgtcttcaacatgaagagtatcacagccgcaacaatcatcaacgcctttagtggcacaatcaacttcggaaccttcgttgctgccttcctttgcgacacttacttcggtcgttacaagacactaaccgtcgcggtcatcgcatgttttcttgtaataatccatcctctataaccttttcttcctccacaagcaatcttggtttataaacctaaaaaaaaaaatctggttcttgttttggtagggatcacttgtgatactattaactgctgcagtaccacaactgcatccagctccatgcggaacagccctcacgtgtacaggcccaagtggcggccagatagcctttctactaatgggtcttgcctttcttgtggtgggagcaggtgggattagaccgtgtaatcttgcttttggagctgatcagtttaaccctaaaagcgagtcagggaagagagggattgatagtttctttaactggtacttcttcaccttcacgttcgcgcagatcttgtcgctgacactagttgtctacatccagtccaacgtcagttggaccatcggtttaaccatacctgtcgtgttaatgttcttggcctgcgtgatcttctttgcgggtgataagttgtatgtcaagatcaaagcctcaggtagtccattagctagtatagctcaagttataacggttgctatcaagaaacgtgggttaaaggctgtgaagcagccttgggttaacctttacaattactacccactaaactacgcaaactctaagctcaagtacaccgaccagttcaggtaaagacacacggttataaataatatctttccacttttgtttacttagaaagcaagctttctttttttggtaggtttcttgataaggcggcgatcttggctcctgaagacaagttggaggctgatggtaagcctacggatccatggaagctatgtacaatgcaacaagttgaagaagtgaagtgcattgtgagagtgcttcctatatggttcgcttcatcaatctattacttgaccatcacacaacaaatgacctacccagtcttccaagccctccagagcgatcgtcgcttacgctctggagggtttgtgattcctgcagccacctatgtggtcttcttgatgacgggaatgactgttttcatcataatctacgaccgcgtactcgtgcctaccttgagaagaatcaccggtatagacaccgggatcacgctcttgcaaaggataggaaccgggattttcttcgcctttttgagcttggtagtgtctggtttcgtcgaggaacggaggagaaccttcgcattgactaaaccaacactcggtatggcgccacggaagggagaaatctcctcaatgtcagctatgtggctgataccgcagctcacactcgcgggtgtagccgaggcatttggagctattggacagatggagttttactacaagcagttccccgagaacatgaggagtttcgccggctccatcttctatgtcggaggaggagtttcgagttacctcggcagcttcttgattgcaacggtacacaggacgacgcagaactcggctggcggtaactggttggctgaagatttgaacaaaggaagattggatttgttttacttcatgatcgctggaatcttggcggttaattttgcttacttcttggtgatgtcaagatggtataggtacaaaggaagtgatgatgaagtgacagcttatgaaacaaatggagatgtgatcaaacaacaagacaagaacaaagtctaa

SEQ ID NO: 28 - protein, 612 aa, Brassica napus
MERKPLEVESTDHQKPSSAVYDGSATAVDSVEEEVQETKLVYRGWKVMPFIIGNETFEKLGIIGTLSNLLVYLTAVFNMKSITAATIINAFSGTINFGTFVAAFLCDTYFGRYKTLTVAVIACFLGSLVILLTAAVPQLHPAPCGTALTCTGPSGGQIAFLLMGLAFLVVGAGGIRPCNLAFGADQFNPKSESGKRGIDSFFNWYFFTFTFAQILSLTLVVYIQSNVSWTIGLTIPVVLMFLACVIFFAGDKLYVKIKASGSPLASIAQVITVAIKKRGLKAVKQPWVNLYNYYPLNYANSKLKYTDQFRFLDKAAILAPEDKLEADGKPTDPWKLCTMQQVEEVKCIVRVLPIWFASSIYYLTITQQMTYPVFQALQSDRRLRSGGFVIPAATYVVFLMTGMTVFIIIYDRVLVPTLRRITGIDTGITLLQRIGTGIFFAFLSLVVSGFVEERRRTFALTKPTLGMAPRKGEISSMSAMWLIPQLTLAGVAEAFGAIGQMEFYYKQFPENMRSFAGSIFYVGGGVSSYLGSFLIATVHRTTQNSAGGNWLAEDLNKGRLDLFYFMIAGILAVNFAYFLVMSRWYRYKGSDDEVTAYETNGDVIKQQDKNKV

SEQ ID NO: 29 - DNA, 2303 bp, Brassica napus
  CDS (1)..(157)
  CDS (336)..(553)
  CDS (646)..(1199)
  CDS (1394)..(2300)
atggagagaaagtctctagaagtcgagtctatggatcaccaaaaactttcctccgccgtgtacgatggctctgttacggccgttgattctgttaaagaagatgttcaggagaccaaagtcgtttatagaggctggaaagtcatgccttacatcattggtaacgcaataatattatcatttaccgtgctctataaactttcttctttttaatgttaaaaaaaaactttcttcttttggaaactatttcttttgtcgttttgttgtcttaagttttcacttagtcataatattgaagtcttatgatcttggttaatctttgttgttgttaccaccaggaaatgagacatttgagaagcttgggatcattggaacactatcaaaccttctggtttatttaacttctgtcttcaacatgaagagtgtcacagctgcaacaatcatcactgcctttgctggcacagtcaacttcggaactttcgtcgctgctttcctttgcgacacttacttcggtcgatacaagactcttaccgttgcggtcctcgcctgttttcttgtaaagatccatcccctcataactctttcttcctctacaggcaatattggtttataacctaaaaaaaaaaaaatctggttcttgttttgtagggatcacttgcgatactattgactgctgcagtcccacagctacatccagccccatgcggcacagcgagctcgtgtatcgggccaagtggtggccagatagcgtttctactgatgggtcttgggattcttgtcgtgggagcaggagggattagaccgtgcaatctagctttcggagctgatcagtttaatccgaagagcgggtcagggaagagagggattgatagtttcttcaactggtacttctttaccttcactttcgcgcagatcttgtctctgacagtagttgtctatgtccagtctaatgtcagttggaccatcggtttaaccatcccggttgttctaatgttcttggcctccgtgattttctttgcgggtgctaagttgtatgttaagatcgaagcctcaggtagtccattggctagcatagctcatgttataacggctgctatcaagaaacacaggttagagccagtggaacagccttggctgaacctttacaactactacccatcaaaatacgcaaacgccaagctcaaatacacccaacaattcaggtaaacacacacttttaaaccggtaaaaaaacaccgttatatatatatatatatatttttttgagtgaatgaatgttaaaattattcatatcaaaacttttttacaatgactgcatctatagttgatatatatatacttatacaatgtcttttttgatgctttatgtttactgagagagattcttactcggcaggtttctcgacaaggcggcgatcttgactcctgaagacaagttggaggctgatggtaagcctgtgaatccgtggaatctatgtacaatgcaacaagttgaagaagtgaagtgcatcatgagagtgcttcctatatggtttgcttcatcgatctactacttaaccatggcgcaacaaatgacttatcctgtcttccaagctctccagagtgatcgtcgcctaggctccggaggtttcatgatcccggcagccacctatgttgtcttcttgatgactggcatgaccctcttcatcatattttatgaccgtgtcttggttcctacattaaaaagaataaccggtatagagacgggtataacgctcttgcaaagaattggagccgggatttttttcgcctttttaagcttaattgtctctggtttcgtcgaggaacgtaggagaactttagcactaactcaaccgacactcggtttagcgccacggaagggagaaatctcctcaatgtcggctatgtggctgattccgcagcttgtacttgctggaatagccgacgcgtttggagctattggacagatggagttttactacaagcagttccctgagaacatgaggagtttcgctggttctatcttttacgtaggaggaggagtttcgagttacatcagtagcttcttgatcacaacggttcacaggatgacgcagaactcggcgggtggtaattggttagctgaggatttgaacaaagggagattggattacttctatttcttgttagctggaatcttggcagttaattttgcttacttcttggtgatggcaagatggtataggtacaaaggaagtgatgatgaagagacaagttatgaaaccagtggagatatcatcaaagaacaagacaagaacaaagtctga

SEQ ID NO: 30 - protein, 612 aa, Brassica napus
MERKSLEVESMDHQKLSSAVYDGSVTAVDSVKEDVQETKVVYRGWKVMPYIIGNETFEKLGIIGTLSNLLVYLTSVFNMKSVTAATIITAFAGTVNFGTFVAAFLCDTYFGRYKTLTVAVLACFLGSLAILLTAAVPQLHPAPCGTASSCIGPSGGQIAFLLMGLGILVVGAGGIRPCNLAFGADQFNPKSGSGKRGIDSFFNWYFFTFTFAQILSLTVVVYVQSNVSWTIGLTIPVVLMFLASVIFFAGAKLYVKIEASGSPLASIAHVITAAIKKHRLEPVEQPWLNLYNYYPSKYANAKLKYTQQFRFLDKAAILTPEDKLEADGKPVNPWNLCTMQQVEEVKCIMRVLPIWFASSIYYLTMAQQMTYPVFQALQSDRRLGSGGFMIPAATYVVFLMTGMTLFIIFYDRVLVPTLKRITGIETGITLLQRIGAGIFFAFLSLIVSGFVEERRRTLALTQPTLGLAPRKGEISSMSAMWLIPQLVLAGIADAFGAIGQMEFYYKQFPENMRSFAGSIFYVGGGVSSYISSFLITTVHRMTQNSAGGNWLAEDLNKGRLDYFYFLLAGILAVNFAYFLVMARWYRYKGSDDEETSYETSGDIIKEQDKNKV

SEQ ID NO: 31 - DNA, 2393 bp, Brassica napus
  CDS (1)..(157)
  CDS (526)..(743)
  CDS (836)..(1389)
  CDS (1484)..(2390)
atggagagaaagcctctagaagtcgagtcaacggatcaccaaaagcctccctccgccgtgtacgatggctctgttatggcggttgattctgttgaggaagaagttggggagaccaaagtcgtttacagaggctggaaagtcatgccctttatcattggtaacacaaacttttttttataaactttcttcttttgttccaagaaaaaaaactattttttattgcttttcatgtttttttacaaaataaataatcaatagtcagaagaaatgaagaggaaaacatcagtcttgctattggtttgattttttcaaaaaaaaatcgtgagattctctgtactgttgtcaaaagctttgacttagtcaaccagtttttcaagaaaattaaaaaaagagagtgagatctagaatttgagaaggtttcagaacataactgatcaagaatcaactgtatgattcatgcaaagcttgaggcatatgagatcaaagtcttatgatcatcttggttttgtttgttggtatcatcaggaaatgagacgttcgagaagcttgggatcattggaacactatcaaaccttttggtttatttaactgccgtcttcaacatgaagagtatcacagctgcaacaatcatcaatgcattcagtggcacaatcaacttcggaaccttcgttgctgctttcctctgcgacacttacttcggtcgatacaagactctaaccgtcgctgtcatcgcctgttttcttgtaatgatcattcctttgcaatctttcttgctccacaagcgttcttagtttaacaaccctaaaaatctgataattgctgttcttttttgtaggggtcacttgtgatactattgacagctgcagtgccacaattacatccagctccatgcggaacagctctctcatgtatcgggccaagtggcggccagatagcgtttctactgttgggtctcgggtttcttgtagttggagcaggcgggattagaccatgtaatctagctttcggggctgatcagtttaaccccaagagcgagtcagggaaacgaggcatcgatagtttctttaattggtacttcttcaccttcacgttcgcgcagatcttgtcgctgacactgatcgtctatatccagtctaatgtcagctggaccatcggtttaaccatcccggtcgttctcatgttcttggcttgtgtgattttcttcgcgggtgataagttgtatgtgaagatcaaggcctcaggtagtccattggctggtatagctcaagttatagcggttgcaatcaagaaacgtgggttaaagccaacgaaagagccttggcttaacctttacaattactacccaccaaaatacgcaaactccaaactcaaatacaccgaccagtttaggtaacaaaacacacacacgccaagagttagttttatctttaatatctttccacttttgttttatggttactgaggaagtttcctgttttggcaggtttcttgataaggcggcgattttggctcccgaagacaagttggaggctgatggtaagcctgcggatccatggaagctttgtacaatgcaacaagttgaagaagtgaagtgcattgtgagagtgcttcctatatggtttgctgcatccatctattacttgaccatcacgcaacaaatgacttaccccgtcttccaagccctccagagcgaccgtcgcttaggatccagaggatttgtgatcccggcagccacctacgttgtctttttgatgacaggaatgacggttttcatcatattctacgaccgtgtcctcgtgcctaccttaagaagaataaccggtatagacacggggataacgctcttgcagaggattggaaccggtattttcttcgcctttgttagcttgatagtctccggtttcgtcgaggaacggaggagaacgttcgcgctgactaaaccaacacttggtatggctccaaggaagggagaaatctcctcaatgtcagctatgtggctgatcccacaactcgcccttgcgggtatagccgaggcgtttggagctattggacagatggagttttactacaagcaattccctgagaacatgaggagttttgctggttcgatcttctatgtaggagcaggagtttcaagctacctcggtagcttcttgattgcaatggttcacaggacgacgcagaactcggctggtggtaattggttagctgaggatttgaacaaaggaagattggattacttctatttcatgatcgctggaatcttggcggttaattttgcttacttcttggtcatgtcaagatggtatagatacaaaggaagtgatgatgaagtgacaacttatgaaaccaatggagatgctatcaaacaacaagacaagaatactgtctga

SEQ ID NO: 32 - protein, 612 aa, Brassica napus
MERKPLEVESTDHQKPPSAVYDGSVMAVDSVEEEVGETKVVYRGWKVMPFIIGNETFEKLGIIGTLSNLLVYLTAVFNMKSITAATIINAFSGTINFGTFVAAFLCDTYFGRYKTLTVAVIACFLGSLVILLTAAVPQLHPAPCGTALSCIGPSGGQIAFLLLGLGFLVVGAGGIRPCNLAFGADQFNPKSESGKRGIDSFFNWYFFTFTFAQILSLTLIVYIQSNVSWTIGLTIPVVLMFLACVIFFAGDKLYVKIKASGSPLAGIAQVIAVAIKKRGLKPTKEPWLNLYNYYPPKYANSKLKYTDQFRFLDKAAILAPEDKLEADGKPADPWKLCTMQQVEEVKCIVRVLPIWFAASIYYLTITQQMTYPVFQALQSDRRLGSRGFVIPAATYVVFLMTGMTVFIIFYDRVLVPTLRRITGIDTGITLLQRIGTGIFFAFVSLIVSGFVEERRRTFALTKPTLGMAPRKGEISSMSAMWLIPQLALAGIAEAFGAIGQMEFYYKQFPENMRSFAGSIFYVGAGVSSYLGSFLIAMVHRTTQNSAGGNWLAEDLNKGRLDYFYFMIAGILAVNFAYFLVMSRWYRYKGSDDEVTTYETNGDAIKQQDKNTV

SEQ ID NO: 33 - DNA, 1833 bp, Brassica napus
  CDS (1)..(204)
  CDS (297)..(850)
  CDS (924)..(1830)
gagaagcttgggatcattggaacactatcaaaccttctggtttacttaactgctgtcttcaacatgaagagtatcacagccgcaacaatcatcaacgcctttagcggcacaatcaacttcggaaccttcgttgctgccttcctttgcgacacttacttcggccgttacaagacactaaccgtcgcggtcatcgcatgttttcttgtaataatccatcctctataaccttttcttcctccacaagcaatcttggtttataaacctaaaaaaaaaaaatctgattcttgttttggtagggatcacttgtgatactattaactgctgcagtaccacaactgcatccagctccatgcggaacagccctcacgtgtacaggcccaagtggtggccagatagcctttctactaatgggtcttgcctttcttgtggtgggagcaggtgggattagaccgtgtaatcttgcttttggagctgatcagtttaaccctaaaagcgagtcagggaaaagagggattgatagtttctttaactggtacttcttcaccttcacgttcgcgcagatcttgtctctgacactagttgtctacatccagtctaacgtcagttggaccatcggtttaaccatcccggtcgtgttaatgttcttggcctgcgtgatcttctttgcgggtgataagttgtatgtcaagatcaaagcctcaggtagtccattggctagtatagctcaagttataacggttgctatcaagaaacgtgggttaaaggctgtgaagcagccttgggttaacctttacaattactacccactaaactacgcaaactccaagctcaagtacactgaccagttcaggtaaaagacacagttataaataatatctttccacttttgtttacttagaaagcaagctttctatttttggcaggtttcttgataaggcggcgatattggctcctgaagacaagttggaagctgatggcaagcctacggatccatggaagctatgtacaatgcaacaagttgaagaagtgaagtgcattgtgagagtgcttcctatatggtttgcttcatcgatctattacttgaccatcacgcaacaaatgacttatccagtcttccaagccctccagagcgatcgtcgcttatgctctggagggtttgtgattcctgcagccacctatgtggtcttcttgatgacgggaatgactgttttcatcataatctacgaccgcgtcctcgtgcctaccttgaggagaatcaccggtatagacaccgggatcacgctcttgcaaaggataggaactgggattttcttcgcctttttgagcttggtagtgtccggtttcgtcgaggaacggaggaggaccttcgcattgactaaaccaacactcggtatggcgccacggaagggagaaatctcctcaatgtcagctatgtggctgataccgcagctcacactcgcgggtgtagccgaggcgtttggagccattgggcagatggagttttactacaagcagttccccgagaacatgaggagtttcgccggttccatcttctatgtgggaggaggagtttcgagttacctcggtagcttcttgattgcaacggttcacaggacgacgcagaactcggctggcggtaactggttagctgaagatttgaacaaaggaagattggatttgttttacttcatgatcgctggaatcttggcggttaattttgcttacttcttggtgatgtcaagatggtataggtacaaaggaagtgatgatgaagtgacagcttatgaaacaaatggagatgtgatcaaacaacaagacaagaacaaagtctaa

SEQ ID NO: 34 - protein, 555 aa, Brassica napus
EKLGIIGTLSNLLVYLTAVFNMKSITAATIINAFSGTINFGTFVAAFLCDTYFGRYKTLTVAVIACFLGSLVILLTAAVPQLHPAPCGTALTCTGPSGGQIAFLLMGLAFLVVGAGGIRPCNLAFGADQFNPKSESGKRGIDSFFNWYFFTFTFAQILSLTLVVYIQSNVSWTIGLTIPVVLMFLACVIFFAGDKLYVKIKASGSPLASIAQVITVAIKKRGLKAVKQPWVNLYNYYPLNYANSKLKYTDQFRFLDKAAILAPEDKLEADGKPTDPWKLCTMQQVEEVKCIVRVLPIWFASSIYYLTITQQMTYPVFQALQSDRRLCSGGFVIPAATYVVFLMTGMTVFIIIYDRVLVPTLRRITGIDTGITLLQRIGTGIFFAFLSLVVSGFVEERRRTFALTKPTLGMAPRKGEISSMSAMWLIPQLTLAGVAEAFGAIGQMEFYYKQFPENMRSFAGSIFYVGGGVSSYLGSFLIATVHRTTQNSAGGNWLAEDLNKGRLDLFYFMIAGILAVNFAYFLVMSRWYRYKGSDDEVTAYETNGDVIKQQDKNKV

SEQ ID NO: 35 - DNA, 2367 bp, Brassica napus
  CDS (1)..(154)
  CDS (332)..(549)
  CDS (638)..(1191)
  CDS (1458)..(2364)
atggagagaaagtctctcgaagtcgagtctatggatcaccaaaaactttcctccgcctacgatggctctgttacggccgttgattctgttaaagaagatgttcaggagaccaaagtcgtttatagaggctggaaagtcatgccttacatcattggtaacgcaataatattatcatttaccgtgctctgtaaactttcttctttttaatgttaaaaaaaaaactttcttcttttggaaactatttcttttgtcgttttgttgtcttaagttttcacttggtcattattgaagtcttatgatcttggttaatttttgttgttgttaccaccaggaaatgagacttttgagaagcttgggatcattggaacactatcaaaccttctggtgtatttaacttctgtcttcaacatgaagagtgtcacagctgcaacaatcatcaatgcctttgctggcacagtcaacttcggaactttcgtcgctgctttcctttgcgacacttacttcggtcgatacaagactcttaccgtcgcggtcctcgcctgttttcttgtaaagatccaccccgtctaattatttcttcctctacaagcaatcttggtttataacctaaaaataaaatctggttcttgttttgtagggatcacttgcgatactattgactgctgcagtcccacaactacatccagccccatgcggcacagcgagctcgtgtagcgggccaagtggtggccagatagcgtttctactgatgggtcttgggattcttgtggtgggagcaggagggattagaccgtgcaatctagctttcggagctgatcagtttaatccgaagagcgggtcagggaaaagagggattgatagtttcttcaactggtacttcttcaccttcactttcgcgcagatcttgtctctgacagtagttgtctatgtccagtctaatgtcagttggaccatcggtttaaccatcccggttgttttaatgttcttggcctccgtgattttctttgcgggtgctaagttgtatgttaagatcgaagcctcaggtagtccattggctagtatagctcatgttataacggctgctatcaagaaacacgggttaaagtcagtggaacagccttggctgaacctttacaactactacccatcaaaatacgcaaacgccaagctcaaatacaccgaacaattcaggtaaacacacttttaaaccggtaaaaaccaccgtttatacttgatatatatatatatatttatttttttttttgaatgaatgttaaaattattcatatcaaaacatttttacaatgactgcatctatagttgatatatatctatatataatttgactcaataaagaactcaaaaacattcggtaaaaacattgtcacacctaaaactagtcttggtttgtcttttctgatgctttatttttactgagagagattcatactcggcaggtttctcgacaaggccgcgaacttgactcctgaagacaagttggatgctgatggtaagcctgtgaatccgtggaatctatgtacaatgcaacaggttgaagaagtgaagtgcatcatgagagtgcttcctatatggtttgcttcatcgatctactacttaaccatcgcgcaacaaatgacttatcctgtcttccaagctctccagagtgatcgtcgcttaggctctggaggtttcatgatcccggcagccacctatgttgtcttcttgatgactggcatgaccctcttcatcatattttatgaccgtgtattcgttcctacattaaaaagaataaccggtatagagacgggtataacgctcttgcaaagaattggagccgggattttcttcgccttgttaagcttaattgtctctggtttcgtcgaggaacgtaggagaaccttagcactaactaaaccgacactcggtttagcgccacggaagggagaaatctcctcaatgtcggctatgtggctgattccgcagcttgtacttgctggtatagccgacgcatttggagctattggacagatggagttttactacaagcagttccctgagaacatgaggagtttcgctggttctatcttttacgtaggagcaggagtttcgagttacatcagtagcttcttgatcacaacggttcacaggatgacgcagaactcggcgggtggtaattggttagctgaggatttgaacaaaggaagattggattacttctatttcttgttagctggaatcttggcagttaattttgcttacttcttggtgatggcaagatggtataagtacaaaggaagtgatgatgaagagacaagttatgaaaccagtggagatatcatcaaagaacaagacaagaacaaagtctga

SEQ ID NO: 36 - protein, 611 aa, Brassica napus
MERKSLEVESMDHQKLSSAYDGSVTAVDSVKEDVQETKVVYRGWKVMPYIIGNETFEKLGIIGTLSNLLVYLTSVFNMKSVTAATIINAFAGTVNFGTFVAAFLCDTYFGRYKTLTVAVLACFLGSLAILLTAAVPQLHPAPCGTASSCSGPSGGQIAFLLMGLGILVVGAGGIRPCNLAFGADQFNPKSGSGKRGIDSFFNWYFFTFTFAQILSLTVVVYVQSNVSWTIGLTIPVVLMFLASVIFFAGAKLYVKIEASGSPLASIAHVITAAIKKHGLKSVEQPWLNLYNYYPSKYANAKLKYTEQFRFLDKAANLTPEDKLDADGKPVNPWNLCTMQQVEEVKCIMRVLPIWFASSIYYLTIAQQMTYPVFQALQSDRRLGSGGFMIPAATYVVFLMTGMTLFIIFYDRVFVPTLKRITGIETGITLLQRIGAGIFFALLSLIVSGFVEERRRTLALTKPTLGLAPRKGEISSMSAMWLIPQLVLAGIADAFGAIGQMEFYYKQFPENMRSFAGSIFYVGAGVSSYISSFLITTVHRMTQNSAGGNWLAEDLNKGRLDYFYFLLAGILAVNFAYFLVMARWYKYKGSDDEETSYETSGDIIKEQDKNKV

SEQ ID NO: 37 - DNA, 2454 bp, Brassica rapa
  CDS (1)..(151)
  CDS (598)..(815)
  CDS (908)..(1461)
  CDS (1542)..(2451)
atggagagaaagccctttgatgttgagacaactgaggatcacaaaccctactcctccgtcgatgacggtggttctgattcggtcgattcatttgaaaacgagcagaaaaagctcgtttatagaggctggaaagtcatgccctttatcattggtaacgcttcttctcttcagaccacttttttttttagtttattctgttttgttttgttgtgtctcttttgtcggattatagaacgttttgcccgtgatgtttttattttaatttcgtttcttttgtcttcttagacttgatttggagttcttgtcttgacgtttcgagattattgaaacacagatcaaccaaaccagttgagtttcctagataaatctaccatggaaagttagagactttgaatcatgcaagttttaagtttctgaaataagattttagttagtttctgggagttataacagttaaagaatgaatgaataataaagtgtccagtccaccactgaaagtccaatctttgatttcaacattgtgaattaaatgtaaaaaggttgttactttatggtttgactaattatttatgttgaaaaaaatatattgtgtcacaggtaatgagacatttgagaagatagggatcattgggacactatcaaaccttctggtgtacctaacttcagtattcaacctcaagagtgttacagctgcaaccatcatcaacgccttcagtggcactatcaacttcggcactttcctcgctgctttcctctgcgacacttactttggtcgctacaagactctctctgttgctgtcatcgcctgttttctggtactctaatcaaatgaccatcttgttttattttggccaagattttgtcatttttttttaaattactaaaccatatttcatatttgttgtagggatcgcttgtgatactactgacggctgcagttccaggattgcaccccattccttgtggaacacaaagttcttgccaaggcccaagcgagggccagattgcgtttcttctgatgggtttagcgcttcttgtggtgggtgctggtggaatcaggccgtgtaacttggcctttggtgctgaccagttcaaccccaagtcagaatctggaaagaaaggaatcaacagtttcttcaactggtacttcttcactttcacgttcgcgcagatcatctccctcacgctagttgtgtacatccagtcaaatgtgagctggaccatcggtttgagtatccctgtgggtcttatgttcttggcctgtgtcattttctttgctggtcataaactgtatgtgaaagtgaaagcctctggtagtccattggctggtataggtcatgttatagccgcagcgatcaagaaacgtggcttgaagccagttaagcagccttggatcgatctttacaaccacattcctcataactatgcaaactctactcttaaatacaccgaccagcttaggtaaagtcagaatagttctgtctctgtctttctttgttcatttgctttatgctttgtgtgaacaaatgttgtattgccaggtttctagacaaagcagcgattatgacccctgaggacaagttgaactcggatggaacggcttcggatccatggaaactatgtacgatgcagaaagtggaagaagtgaaatgcattttaagagtgattccaatctggttcgcatgcgccatttactaccttgcaataagtatgcaaatgacttatccagtcttccaagcgctccagagcgacaggagattaggttcaggtggcttcaagattccagccgccacctatgtcgtgttcttgatgtctggtatgacggttttcatcataatctacgaccgtgtcctcgtcccctcgctcaaaagagtgacgggtctagacacggggataacactcttacaaagaataggagctggcattttctttgcggtgttgagtttattggtctccgggttcatagaggaacgtagaagaacctttgcgctgacacgacctacgctggggtcggagcctcgaacaggagagatctcctcaatgtcagcgatgtggctgattccgcagctggtgcttgcaggggtagcagaagcttttgcagccattgggcaaatggagttttactacaagcagtttcctgaaaacatgaagagctttgcgggttctatcttctatgtcggtgcaggagtttctagctacctcgctagcttcttgatctcgactgttcatagaacaactgagcattcacctacggggaattggttagctgaggatctgaacaaagcgaagctggactacttctatttcatgctcacaggactcatgttcgttaactttctttacttcttgttaatggctagatggtatagatacaaaggcactcatgatgaagtcagttatgtggttgacactgttgacgaagagacaaagcaacaagacaagaactctgtctga

SEQ ID NO: 38 - protein, 611 aa, Brassica rapa
MERKPFDVETTEDHKPYSSVDDGGSDSVDSFENEQKKLVYRGWKVMPFIIGNETFEKIGIIGTLSNLLVYLTSVFNLKSVTAATIINAFSGTINFGTFLAAFLCDTYFGRYKTLSVAVIACFLGSLVILLTAAVPGLHPIPCGTQSSCQGPSEGQIAFLLMGLALLVVGAGGIRPCNLAFGADQFNPKSESGKKGINSFFNWYFFTFTFAQIISLTLVVYIQSNVSWTIGLSIPVGLMFLACVIFFAGHKLYVKVKASGSPLAGIGHVIAAAIKKRGLKPVKQPWIDLYNHIPHNYANSTLKYTDQLRFLDKAAIMTPEDKLNSDGTASDPWKLCTMQKVEEVKCILRVIPIWFACAIYYLAISMQMTYPVFQALQSDRRLGSGGFKIPAATYVVFLMSGMTVFIIIYDRVLVPSLKRVTGLDTGITLLQRIGAGIFFAVLSLLVSGFIEERRRTFALTRPTLGSEPRTGEISSMSAMWLIPQLVLAGVAEAFAAIGQMEFYYKQFPENMKSFAGSIFYVGAGVSSYLASFLISTVHRTTEHSPTGNWLAEDLNKAKLDYFYFMLTGLMFVNFLYFLLMARWYRYKGTHDEVSYVVDTVDEETKQQDKNSV

SEQ ID NO: 39 - DNA, 2670 bp, Brassica rapa
  CDS (1)..(160)
  CDS (666)..(883)
  CDS (982)..(1535)
  CDS (1755)..(2667)
atggaaagaaagccttttgaggttgagacaacaaagacggatgaggatcagaaaccctactccgctgtcgatggcggtggttctgattcggtcgattcatttgatgaagatcagaaaaagctcgtgtacagaggatggaaagtcatgccttttatcattggtaacgcttattttcttctctattcagacactccttttttattttattgtgtgtctgcttctctcaacacggtccagaaactaaataaagatgtggaaaataaactagaacatgttgtccgtgaaatttaaaaagtacttttcttttctcttcttctctttgactgaaaacgattgaaaccaggatcaaccaaatctaccagatctagagaaaggtgttactacaactttttttcattaataatgctttttaatttttagttttatacgcttaaagacaaagttatttagtttctgggagttacagcagttaaaagttaaaacaaaaggaataaagtttcaagttaaagaagcactgaaagtacaacttcgattcgtgtgtgtttcggtttaaaagttgtgaattaaaaagtttgttactgtataggaaacccgtttttccctttgactactgattcatttattgtgaaaaagaaaattaataatgattcttgttctttttacaggtaatgaaacatttgagaagattgggatcattgggacattatcaaaccttcttgtgtacctaactcaagtattcaacctcaagaaatacacagctgcaaccatcatcaatgcctttagtggcaccatcaacttcggcactttcctcgctgctttcctctgcgacacttactttggtcgctacaagactctcagtgttgctgtcatcgcttgttttctggtacctactagtactaatgctgtccttaacggttttgttttttcgtcaaggctctattctttttttctttttgctaaaccgtgttttatcgtttgtagggatcgcttgcgatactactcacggcagcagttccgggactgcacccgactccttgtggaacaaaaagttcatgcgaagggccaggtgcggggcagattttgtttctgatgttgggtttagcgcttcttgtggttggtgctggtggtatcaggccgtgtaacttggcgtttggtgccgatcagttcaaccccaagtccgaatcaggaaagaaaggaatcaacagtttcttcaactggtacttcttcactttcacgttcgcgcagatcatctcgctcacgctagttgtgtatatccagtcgaatgtgagctggaccatcggtttgagtatccccgtgggtctcatgttcttggcttgcgtcattttcttcgctggtcacaaactttatgtaaaagtgaaagcctcgggtagtcccttggctggtatagctcgtgttatagcagccgcgatctcgaaacgaggattgaagccggttaagcagccttgggtcgatctttacaatcacattcctcgtaactatgcaaacttaaccctaaaatacaccgaccagttcaggtaaactgaatagttctgtctctattgctttatatcttggcacagccggatggatgccttgacttctaaatatttttaaaatgggtcgtatagactccaagttgtcaaatttgttgaccaaaatatatattttttatttaccaaaatatttttaaaatgggcctggttggaaacaaaatgctgaaaactaaatgttggttttgtttgttatattgttaggtttctagacaaagcagcgataatgacacctgaggacaagttgaactctgatggaacagcttcggatccatggaaactatgtacgatgcagcaagtggaagaagtgaaatgcattataagagtgattccgatctggtttgcttgcgctatctactaccttgcaataagcattcaaatgacttatcccgtcttccaagcgcaacagagcgacaggagattaggtaccggtggcttcaagatccccgcagccacctacgtagttttcttgatgaccggtatgacggttttcatcataatctacgaccgtgtccttgtcccgtcgctcaaaagagtgaccggtctagacactggtataacactcttgcaaaggatcggagcggggatcttctttgccgtgttgagtttattggtctccgggttcatagaggaacgtagaagaagcattgcgctgacaaaacagactctagggatggagcctcgaacaggagagatctcatcaatgtcggcgatgtggctgattccgcagctggttcttgcagggatagctgaagcgtttacagccattggacagatggagttttactacaagcagtttcctgagaacatgaggagctttgctggttctatcttctatgtcggtgcgggggtttctagctacctcgctagcttcttgatctccactgttcatcggacaactgaacattcaccttcggggaactggttagctgaggatctgaacaaggccaagttggattacttctatttcatgctcacggggctcatgttcgttaacatggtttacttcttgataatggctaagttttatagatacaaaggcagtgatgataaagtcatctctgctattgagaccagtgaagacgagaccaagcagaagcaagcgaagaactcggtttaa

SEQ ID NO: 40 - protein, 615 aa, Brassica rapa; identical to SEQ ID NO: 16

SEQ ID NO: 41 - DNA, 2351 bp, Brassica rapa
  CDS (1)..(154)
  CDS (512)..(729)
  CDS (808)..(1361)
  CDS (1430)..(2348)
atggagagaaagccctttgagtttgagacgacggaggatcacaaaccctactccgatggcggtggttctaatttaacgtcgacggttgattcatctggcgacgagcagaaaaagctcgtttatagaggctggaaagtcatgccttatatcattggtaacgcttttctctctctctagaccgttatttttaaactctgttttctttttgtcaactaactctgttttttcgtgtaacagaacacttttccccgtgatggtttttttgtcatttaataatttgtttatttttattttgtcacgttggcttgactgtgacagtgttctagataatctaccaggtgtagtgtacagaaagaaatgttacgttgtgttctttagtaacgtttttaaatgtccgtgaaaaggactttgaatcactggaagtccaatcttggttccaaactgtgttactttatgagaaacccatgttggtttgactattcattaacgaaaagaatttgtatcttgataggtaatgagacatttgagaagattgggatcatagggacattatcaaaccttctagtgtacctaactcaagtattcaaccttaagaaatacacagctgcaactattatcagtgcctttagtggcactatcaacttcggcactttcttcgctgcttttctttgtgacacttactttggtcgctacaagactctcagtgtggctgtcatcgcttgttttctggtactaatgcagctgatcttaatgggttttttttcttacgccaagactcttaatgctgttcatttttcgtctgtgtagggatcgctttttatactaatgacggctgcagttccgggattgcacccgactccttgtggaactaaaagttcgtgccaagggccaaatggggggcaggttttgtttctgctgttgggtttagcgcttctcgtagtcggtgctggtggtatcaggccgtgtaatttggcctttggagctgatcagttcaaccccaagtcagaatctggaaggaaaggaatcaacagtttcttcaactggtacttcttcactttcacgtttgcgcagatcatctcgctcacgctagttgtgtatatccagtcaaacgtgagctggaccattggcttgagtatccctgtgggtctaatgttcttggcctgcgtcatttactttgctggccataatctctacgtaaaagtgaaagcctcgggtagtcccttggctggcatcgctcgtgttatagctgcagcgatcaagaaacgagggttgaagcctgttaagaagccttgctccgatctttacaatcacatcccgcctaactatgcaaactctacactcaaatactcggaccagtttaggtaaaactctaagagtttctctctctgttgctttatgtttctgtcttttaacatgtttatgtttctagatttctcgacaaggcagcggtgatgacccctgaggacaagttgaaacccgatggaacggcttcagatccatggaatctatgtacaatgcagcaggtggaagaagtgaaatgcattgtaagagtgattccaatctggttagcttgcgcagtttactacctggcaataacattgcaaatgacttatccggtcttccaagcgctccagagcgaccggagattgggttcaggtggcttcaagattcccggcgccacctatgtagtgttcttgatgtccggtatgacggttttcatcatattctacgaccgtgtccttgtcccgtcgctcagaagagtgacatggctagacaatggtataactctcttacaaagaatcggatcaggcattttcttcgcgcttttgagtttgttggtttctgggttcgttgaggaacggcgaagagccattgcactgacaaaacctactctcgggattgagcctcgagcaggagaaatctcagcaatgtcggcgatgtggctgattccgcagctcgtgcttgcagggatagctgaagcttttgcagctgttggacaaatggagttttactacaagcagtttcctgaaaacatgaagagctttgcgggttctatcttctatgtcggtgcaggagtttctagctacctcgctagcttcttgatctcgactgttcataaaacaactgagcattcacgctccgggaattggctagctgaggatttgaacaaagggaagctggattacttttatttcatgctcactggcctcatgtttgttaacatggtttacttcttgttaatggctaaattttatagatacaaagtcactaacgatgaagcaaattctgtgattaagaccaatgaagaagagaccaaggagaatcagcaacaagacaagagctatgtctga

SEQ ID NO: 42 - protein, 615 aa, Brassica rapa
MERKPFEFETTEDHKPYSDGGGSNLTSTVDSSGDEQKKLVYRGWKVMPYIIGNETFEKIGIIGTLSNLLVYLTQVFNLKKYTAATIISAFSGTINFGTFFAAFLCDTYFGRYKTLSVAVIACFLGSLFILMTAAVPGLHPTPCGTKSSCQGPNGGQVLFLLLGLALLVVGAGGIRPCNLAFGADQFNPKSESGRKGINSFFNWYFFTFTFAQIISLTLVVYIQSNVSWTIGLSIPVGLMFLACVIYFAGHNLYVKVKASGSPLAGIARVIAAAIKKRGLKPVKKPCSDLYNHIPPNYANSTLKYSDQFRFLDKAAVMTPEDKLKPDGTASDPWNLCTMQQVEEVKCIVRVIPIWLACAVYYLAITLQMTYPVFQALQSDRRLGSGGFKIPGATYVVFLMSGMTVFIIFYDRVLVPSLRRVTWLDNGITLLQRIGSGIFFALLSLLVSGFVEERRRAIALTKPTLGIEPRAGEISAMSAMWLIPQLVLAGIAEAFAAVGQMEFYYKQFPENMKSFAGSIFYVGAGVSSYLASFLISTVHKTTEHSRSGNWLAEDLNKGKLDYFYFMLTGLMFVNMVYFLLMAKFYRYKVTNDEANSVIKTNEEETKENQQQDKSYV

SEQ ID NO: 43 - DNA, 2369 bp, Brassica rapa
  CDS (1)..(157)
  CDS (499)..(716)
  CDS (812)..(1365)
  CDS (1460)..(2366)
atggagagaaagcctctagaagtcgagtcaacggatcaccaaaagcctccctccgccgtgtacgatggctctgttatggcggttgattctgttgaggaagaagttgaggagaccaaagtcgtttacagaggctggaaagtcatgccctttatcattggtaacacaaactttttttttataaactttcttcttttgttccaagaacttttttttttaattgcttttcatgttttttttccaaaataaataatcaatagttgaagaaatgaagaggaaaacatcagtcttgcttgaagacttattggtttgatttaaaaaaaaaaatcgtgagattctctgtactgttgtcaaaagctttgacttagtcaaccagttttttaagaaaattaaaaaaaagagagtgagatctagaatttgagaaggtttcagaacataactttgaggcatatgagatcaaagtcttatgatcatcttggttttgtttgttggtattatcaggaaatgagacgtttgagaagcttgggatcattggaacactatcaaaccttctggtttatttaactgctgtcttcaacatgaagagtatcacagctgcaacaatcatcaatgcattcagtggcacaatcaacttcggaaccttcgttgctgctttcctctgcgacacttacttcggtcgatacaagactctaactgtcgctgtcatcgcctgttttcttgtaatgatcattcctttgcaatctttcttgctccacaagcgttcttagtttaacaaccctaaaaatctgataattgttgttctttttttttgtagggatcacttgtgatactattgacagctgcagtgccacaattacatccagctccatgcggaacagctctctcatgtatcgggccaagtggtggccagatagcgtttctactgctgggtctcggctttcttgtagttggagcaggcgggattagaccatgtaatctagctttcggggctgatcagtttaaccccaagagcgagtcaggaaaacgaggcatcgatagtttcttcaattggtacttcttcaccttcacgttcgcgcagatcctgtcgctgacactaatcgtctatatccagtccaatgtcagctggaccatcggtttaaccatcccggtcgttctcatgttcttggcctgcgtgattttctttgctggagataagttgtatgtgaagatcaaagcatcaggtagtccattggctggtatagctcaagttatagcggttgcaatcaagaaacgtgggttaaagccaacgaaagagccttggcttaacctttacaattactacccaccaaaatacgcgaactccaaactcaaatacaccgaccagtttaggtaacaaaatacacacacgccaagagttagttttatctttaatatctttccacttttgttatatggttactgagaaagtttcctgttttggcaggtttcttgataaggctgcgatcttggctcccgaagacaagttggaggctgatggtaagcctgcggatccatggaagctccgtacaatgcaacaagttgaagaagtgaagtgcattgtgagagtgcttcctatatggtttgctgcatcgatttattacttgaccatcacgcaacaaatgacttaccccgtcttccaagccctccagagcgaccgtcgcttaggatccagaggatttgtgatcccggcagccacctacgttgtctttttgatgacaggaatgacggttttcatcatattctacgaccgtgtcctcgtgcctaccttaagaagaataaccggtatagacacggggataacactcttgcagaggattggaaccggtattttcttcgcctttgttagcttgatagtctcaggtttcgtcgaggaacggaggagaacgttcgcgctgactaaaccaacacttggtatggctccaaggaagggagaaatctcctcaatgtcagctatgtggctaatcccacaactcgcccttgcgggtatagccgaggcgtttggagctattggacagatggagttttactacaagcaattccctgagaacatgaggagttttgctggttcgatcttctatgtaggagcaggagtttcgagctacctcggtagcttcttgattgcaatggttcacaggacgacgcagaactcggctggtggtaattggttggctgaggatttgaacaaaggaagattggattacttctatttcatgatcgctggaatcttggcagttaattttgcttacttcttggtcatgtcaagatggtatagatacaaaggaagtgatgatgaagtgacaacttatgaaaccaatgtagatcccatcaaacaacaagacaagaatactgcctga

SEQ ID NO: 44 - protein, 612 aa, Brassica rapa
MERKPLEVESTDHQKPPSAVYDGSVMAVDSVEEEVEETKVVYRGWKVMPFIIGNETFEKLGIIGTLSNLLVYLTAVFNMKSITAATIINAFSGTINFGTFVAAFLCDTYFGRYKTLTVAVIACFLGSLVILLTAAVPQLHPAPCGTALSCIGPSGGQIAFLLLGLGFLVVGAGGIRPCNLAFGADQFNPKSESGKRGIDSFFNWYFFTFTFAQILSLTLIVYIQSNVSWTIGLTIPVVLMFLACVIFFAGDKLYVKIKASGSPLAGIAQVIAVAIKKRGLKPTKEPWLNLYNYYPPKYANSKLKYTDQFRFLDKAAILAPEDKLEADGKPADPWKLRTMQQVEEVKCIVRVLPIWFAASIYYLTITQQMTYPVFQALQSDRRLGSRGFVIPAATYVVFLMTGMTVFIIFYDRVLVPTLRRITGIDTGITLLQRIGTGIFFAFVSLIVSGFVEERRRTFALTKPTLGMAPRKGEISSMSAMWLIPQLALAGIAEAFGAIGQMEFYYKQFPENMRSFAGSIFYVGAGVSSYLGSFLIAMVHRTTQNSAGGNWLAEDLNKGRLDYFYFMIAGILAVNFAYFLVMSRWYRYKGSDDEVTTYETNVDPIKQQDKNTA

SEQ ID NO: 45 - DNA, 2383 bp, Brassica rapa
  CDS (1)..(157)
  CDS (536)..(753)
  CDS (846)..(1399)
  CDS (1474)..(2380)
atggagagaaagcctctggaagttgagtccaccgatcatcagaaaccttcctccgccgtgtacgacggctctgctacggcggttgattctgttgaagaagaagttcaggaaaccaaactcgtttatagaggctggaaagtcatgcctttcatcataggtaacgcatatgttttaaacatataaaaaatataaatttttgataaaaaaaatatatatcattttctttgattggtatatttccaaagttttagaaactatatttctagaaatttcctgtaattaaattttgacaattttcttctctgtttctagaaactatattttgttggtttgattttattattggtgagattctttgtgttgttgtcttaagctttgacttagtcaaacagtaatttaacccaaaagagtgagatcttgagtttgaagatgtttcagaacacataaatgatcaagaatctcttgtttgattcttcgtttggttgctaaggtcaaagtcttatgatcttttcttcttgcatgttgttattaccaggaaacgagacatttgagaagcttgggatcattggaacactatcaaaccttctggtttacttaactgctgtcttcaacatgaagagtatcacagctgctacaatcatcaacgcctttagtggcacaatcaacttcggaaccttcgttgccgccttcctttgcgacacttacttcggtcgttacaagacactaaccgtcgcggtcatcgcatgttttcttgtaataatccatcctctataaccttttcttcctccacaagcaatcttggtttataaacctaaaaaaaaaaaatctggttcttgttttggtagggatcacttgtgatactattaactgctgcagtaccacaactgcatccagctccatgcggaacagccctcacgtgtacaggcccaagtggcggccagatagcctttctactaatgggtcttgcctttcttgtggtgggagcaggtgggattagaccgtgtaatcttgcttttggagctgatcagtttaaccctaaaagcgagtcagggaagagagggattgatagtttctttaactggtacttcttcaccttcacgttcgcgcagatcttgtcgctgacactagttgtctacatccagtctaacgtcagttggaccattggtttaaccatacctgtcgtgttaatgttcttggcctgcgtgatcttctttgcgggtgataagttgtatgtcaagatcaaagcctcaggtagtccattggctagtatagctcaagttataacggttgctatcaagaaacgtgggttaaaggctgtgaagcagccttgggttaacctttacaattactacccactaaactacgcaaactctaagctcaagtacaccgaccagttcaggtaaagacacacggttataaataatatctttccacttttgtttacttagaaagcaagctttctttttttggtaggtttcttgataaggcggcgatcttggctcctgaagacaagttggaggctgatggtaagcctacggatccatggaagctatgtacaatgcaacaagttgaagaagtgaagtgcattgtgagagtgcttcctatatggtttgcttcatccatctattacttgaccatcacgcaacaaatgacttatccggtcttccaagccctccagagcgatcgtcgcttgggctctggagggtttgtgattcctgcagccacctatgtggtcttcttgatgacgggaatgactgttttcatcataatctacgaccgcgtactcgtgcctaccttgagaagaatcaccggtatagacaccgggatcacgctcttgcaaaggataggaaccgggattttcttcgcctttttgagcttggtagtgtctggtttcgtcgaggaacggaggaggaccttcgcattgactaaaccaacactcggtatggcgccacggaagggagaaatctcctcaatgtcagctatgtggctgataccgcagctcacactcgcgggtgtagccgaggcatttggagctattggacagatggagttttactacaagcagttccccgagaacatgaggagtttcgccggctccatcttctatgtgggaggaggagtttctagttacctcggcagcttcttgattgcaacggtacacaggacgacgcagaactcggctggcggtaactggttggctgaagatttgaacaaaggaagattggatttgttttacttcatgatcgctggaatcttggcggttaattttgcttacttcttggtgatgtcaagatggtataggtacaaaggaagtgatgatgaagtgacaagttatgaaacaaatggagatgtgatcaaacaacaagacaagaacaaagtctaa

SEQ ID NO: 46 - protein, 612 aa, Brassica rapa
MERKPLEVESTDHQKPSSAVYDGSATAVDSVEEEVQETKLVYRGWKVMPFIIGNETFEKLGIIGTLSNLLVYLTAVFNMKSITAATIINAFSGTINFGTFVAAFLCDTYFGRYKTLTVAVIACFLGSLVILLTAAVPQLHPAPCGTALTCTGPSGGQIAFLLMGLAFLVVGAGGIRPCNLAFGADQFNPKSESGKRGIDSFFNWYFFTFTFAQILSLTLVVYIQSNVSWTIGLTIPVVLMFLACVIFFAGDKLYVKIKASGSPLASIAQVITVAIKKRGLKAVKQPWVNLYNYYPLNYANSKLKYTDQFRFLDKAAILAPEDKLEADGKPTDPWKLCTMQQVEEVKCIVRVLPIWFASSIYYLTITQQMTYPVFQALQSDRRLGSGGFVIPAATYVVFLMTGMTVFIIIYDRVLVPTLRRITGIDTGITLLQRIGTGIFFAFLSLVVSGFVEERRRTFALTKPTLGMAPRKGEISSMSAMWLIPQLTLAGVAEAFGAIGQMEFYYKQFPENMRSFAGSIFYVGGGVSSYLGSFLIATVHRTTQNSAGGNWLAEDLNKGRLDLFYFMIAGILAVNFAYFLVMSRWYRYKGSDDEVTSYETNGDVIKQQDKNKV

SEQ ID NO: 47 - DNA, 2304 bp, Brassica rapa
  CDS (1)..(157)
  CDS (335)..(552)
  CDS (643)..(1196)
  CDS (1395)..(2301)
atggagagaaagtctctagaagtcgagtctatggatcaccaaaaactttcctccgccgtgtacgatggctctgttacggccgttgattctgttaaagaagatgttcaggagaccaaagtcgtttatagaggctggaaagtcatgccttacatcattggtaacgcaataatattatcatttaccgtgctctataaactttcttctttttaatgttaaaaaaaactttcttcttttggaaactatttcttttgtcgttttgttgtcttaagttttcacttagtcataatattgaagtcttatgatcttggttaatctttgttgttgttaccaccaggaaatgagacatttgagaagcttgggatcattggaacactatcaaaccttctggtttatttaacttctgtcttcaacatgaagagtgtcacagctgcaacaatcatcactgcctttgctggcacagtcaacttcggaactttcgtcgctgctttcctttgcgacacttacttcggtcgatacaagactcttaccgttgcggtcctcgcctgttttcttgtaaagatccatcccctcataactctttcttcctctacaggcaatattggtttataacctaaaaaaaaaaatctggttcttgttttgtagggatcacttgcgatactattgactgctgcagtcccacaactacatccagtcccatgcggcacagcgagctcgtgtatcgggccaagtggtggccagatagcgtttctactgatgggtcttggaattcttgtcgtgggagcaggagggattagaccgtgcaatctagctttcggagctgatcagtttaacccgaagagcgggtcagggaagagagggattgatagtttcttcaactggtacttcttcaccttcactttcgcccagatcttgtctctgacagtagttgtctatgtccagtctaatgtcagttggaccatcggtttaaccatcccggttgttctaatgttcttggcctccgtgattttctttgcgggtgctaagttgtatgttaagatcgaagcctcaggtagtccattggctagcatagctcatgttataacggcttctatcaagaaacacaggttagagccagtggaacagccttggctgaacctttacaactactacccatcaaaatacgctaacgccaagctcaaatacacccaacaattcaggtaaacacacacttttaaaccggtaaaaaaacaccgttatatatatatatattttttttttttttgagtgaatgaatgttaaaattattcatatcaaaacttttttacaatgactgcatctatagttgatatatatatacttatacaatgtctttttttgatgctttatgtttactgagagagattcttactcggcaggtttctcgacaaggcggcgatcttgactcctgaagacaagttggaggctgatggtaagcctgtgaatccgtggaatctatgtacaatgcaacaagttgaagaagtgaagtgcatcatgagagtgcttcctatatggtttgcttcatcgatctactacttaaccatggcgcaacaaatgacttatcctgtcttccaagctctccagagtgatcgtcgcctaggctccggaggtttcatgatcccggcagccacctatgttgtcttcttgatgactggcatgaccctcttcatcatattttatgaccgtgtcttggttcctacattaaaaagaataaccggtatagagacgggtataacgctcttgcaaagaattggagccgggatttttttcgcctttttaagcttaattgtctctggtttcgtcgaggaacgtaggagaactttagcactaactcaaccgacactcggtttagcgccacggaagggagaaatctcctcaatgtcggctatgtggctgattccgcagcttgtacttgctggtatagccgacgcgtttggagctattggacagatggagttttactacaagcagttccctgagaacatgaggagttttgctggttctatcttttacgtaggagcaggagtttcgagttacatcagtagcttcttgatcacaacggttcacaggatgacgcagaactcggcgggtggtaattggttagctgaggatttgaacaaagggagattggattacttctatttcttgttagctggaatcttggcagttaattttgcttacttcttggtgatggcaagatggtataggtacaaaggaagtgatgatgaagagacaagttatgaaaccagtggagatatcatcaaagaacaagacaagaacaaagtctga

SEQ ID NO: 48 - protein, 612 aa, Brassica rapa
MERKSLEVESMDHQKLSSAVYDGSVTAVDSVKEDVQETKVVYRGWKVMPYIIGNETFEKLGIIGTLSNLLVYLTSVFNMKSVTAATIITAFAGTVNFGTFVAAFLCDTYFGRYKTLTVAVLACFLGSLAILLTAAVPQLHPVPCGTASSCIGPSGGQIAFLLMGLGILVVGAGGIRPCNLAFGADQFNPKSGSGKRGIDSFFNWYFFTFTFAQILSLTVVVYVQSNVSWTIGLTIPVVLMFLASVIFFAGAKLYVKIEASGSPLASIAHVITASIKKHRLEPVEQPWLNLYNYYPSKYANAKLKYTQQFRFLDKAAILTPEDKLEADGKPVNPWNLCTMQQVEEVKCIMRVLPIWFASSIYYLTMAQQMTYPVFQALQSDRRLGSGGFMIPAATYVVFLMTGMTLFIIFYDRVLVPTLKRITGIETGITLLQRIGAGIFFAFLSLIVSGFVEERRRTLALTQPTLGLAPRKGEISSMSAMWLIPQLVLAGIADAFGAIGQMEFYYKQFPENMRSFAGSIFYVGAGVSSYISSFLITTVHRMTQNSAGGNWLAEDLNKGRLDYFYFLLAGILAVNFAYFLVMARWYRYKGSDDEETSYETSGDIIKEQDKNKV

SEQ ID NO: 49 - DNA, 2829 bp, Brassica oleracea
  CDS (1)..(151)
  CDS (619)..(836)
  CDS (1283)..(1836)
  CDS (1917)..(2826)
atggagagaaagccctttgatgttgagacaactgaggatcacaaaccctactcctccgtcgatggcggtggttctgattcggtcgattcatttgaagacgagcagaaaaagctcgtttatagaggctggaaagtcatgccctttatcattggtaacgctttcttcttctcttcagacaacttttttttttagtttattctgttttgttttgttgtgtctcttttgtcggattatagaaagttttgcccgtgatgtttttattttaatttcgtttcttttgtcttcttagtcttgactgttgaaaatcttgatttggagttcttgtcttgacgtttcgagatgaatgaaacacagatcaaacaaatcaaccaaaccagttgagtttcctagataaatctaccatggaaagtgagagacttcgaatcatgcaagttttcagtttcagatataagattttagttagtttctgggagttatagcaaagaatgaataataaagtgtccagtccaacactgaaagtccaatctttgatttcaacattgtgaattaaatgtaaaaaggttgttactttatggtttgactaattatttatgttgaaaaaaatatattgtgtcacaggtaatgagacatttgagaagatagggatcattgggacactatcaaaccttctggtgtacctaacttcagtattcaaccttcagagtgttacagctgcaaccatcatcaacgccttcagtggcactatcaatttcggcactttcctcgctgctttcctctgcgacacttactttggtcgctacaagactctctctgttgctgtcatcgcctgttttctggtactctaatcaaatgaccatcttgttttattttggccaagattttgtctttttttcttactaaaccatactccctccgtttcattttaagtgtcgttttagagatttttttcgttacaaaataagtgtcgttttcgattttcaatgcaaaatttattgattttatgcaaaatttattgattttatgcaaaatttattgattttatgcaaaatttattgattttatgcaaaatttattgattttatgcaaaatttattgattttatgcaaaatttattgattttatgcaaaatttatttttctattggttgaaatatggttaggtgtatagttaatagtgtttttttatacgaaatgtacaaaattaagtgtttccttaatccgtgtgccgaaacctaaaacgacacttataatgaaacagagggagtatttcatatttgttgtagggatcgcttgtgatactactgacggctgcagttccaggattgcaccctattccttgtggaacacaaagttcttgccaaggcccaagcgagggccagattgcgtttctgctgatgggtttagcgcttcttgtggtgggtgctggtggaatcaggccgtgtaacttggcctttggtgctgaccagttcaaccccaagtcagaatctggaaagaaaggaatcaacagtttcttcaactggtacttcttcactttcacgttcgcgcagatcatctccctcacgctagttgtgtatatccagtcaaatgtgagctggaccatcggtttgagtatccctgtgggtcttatgttcttggcctgcgtcattttctttgctggtcacaaactgtatgtgaaagtgaaagcctctggtagtccattggctggtataggtcatgttatagccgcagctatcaagaaacgtggcttgaagccagttaagcagccttggatcgatctttacaaccacattcctcctaactatgcaaactctactcttaaatacaccgaccagcttaggtaaagtcggaatagttctgtctctgtctttctttgttcatttgctttatgctttgtctgaacaaatgttgtattgccaggtttctagacaaagcagcgattatgacccctgaggacaagttgaactcggatggaacggcttcggatccatggaaattatgtacgatgcagaaagtggaagaagtgaaatgcattttaagagtgattccaatctggttcgcatgcgccatttactaccttgcaataagtatgcaaatgacttatccagtcttccaagctctccagagcgacaggctattaggttcaggtggcttcaagattccagccgccacctatgtcgtgttcttgatgtctggtatgacggttttcatcataatctacgaccgtgtccttgtcccctcgctcaaaagagtgaccggtctagacacggggataacactcttacaaagaataggagctggcattttctttgccgtgttgagtttattggtctccgggtttatagaggaacgtagaagaacctttgcgctgacacgacctacgctcgggtcggagcctcgaacaggagagatctcctcaatgtcagcgatgtggctgattccgcagctggtgcttgcaggggtagcagaagcttttgcagccattgggcaaatggagttttactacaagcagtttcctgaaaacatgaagagctttgcgggttctatcttctatgtcggtggaggagtttctagctacctcgctagcttcttgatctcgactgttcatagaacaactgagcattcacctacggggaattggttagctgaggatctgaacaaagcgaagctggactacttctatttcatgctcacaggactcatgtttgtcaactttctttacttcttgttaatggctagatggtatagatacaaaggcactcatgatgaagtcagttatgtggttgacactgttgacgaagagacgaagcaacaagacaagaactctgtctga

SEQ ID NO: 50 - protein, 611 aa, Brassica oleracea
MERKPFDVETTEDHKPYSSVDGGGSDSVDSFEDEQKKLVYRGWKVMPFIIGNETFEKIGIIGTLSNLLVYLTSVFNLQSVTAATIINAFSGTINFGTFLAAFLCDTYFGRYKTLSVAVIACFLGSLVILLTAAVPGLHPIPCGTQSSCQGPSEGQIAFLLMGLALLVVGAGGIRPCNLAFGADQFNPKSESGKKGINSFFNWYFFTFTFAQIISLTLVVYIQSNVSWTIGLSIPVGLMFLACVIFFAGHKLYVKVKASGSPLAGIGHVIAAAIKKRGLKPVKQPWIDLYNHIPPNYANSTLKYTDQLRFLDKAAIMTPEDKLNSDGTASDPWKLCTMQKVEEVKCILRVIPIWFACAIYYLAISMQMTYPVFQALQSDRLLGSGGFKIPAATYVVFLMSGMTVFIIIYDRVLVPSLKRVTGLDTGITLLQRIGAGIFFAVLSLLVSGFIEERRRTFALTRPTLGSEPRTGEISSMSAMWLIPQLVLAGVAEAFAAIGQMEFYYKQFPENMKSFAGSIFYVGGGVSSYLASFLISTVHRTTEHSPTGNWLAEDLNKAKLDYFYFMLTGLMFVNFLYFLLMARWYRYKGTHDEVSYVVDTVDEETKQQDKNSV

SEQ ID NO: 51 - DNA, 2623 bp, Brassica oleracea; identical to SEQ ID NO: 21
  CDS (1)..(160)
  CDS (638)..(855)
  CDS (955)..(1508)
  CDS (1708)..(2620)

SEQ ID NO: 52 - protein, 615 aa, Brassica oleracea; identical to SEQ ID NO: 22

SEQ ID NO: 53 - DNA, 2365 bp, Brassica oleracea
  CDS (1)..(154)
  CDS (516)..(733)
  CDS (812)..(1365)
  CDS (1444)..(2362)
atggagagaaagccctttgaggttgagacgacggaggatcacaaaccctactccgatggaggtggttctgatttaacgtcgacggttgattcatctggcgacgagcagaaaaagctcgtttatagaggctggaaagtcatgccttatatcattggtaacgcttttctctctctctctagaccgttatttttaaactctgttttctttttgtcaactaactctgttttttcgtgtaacagaacacttttccccgtgttggttttttttgtcatttaataattttgtttatttttatcttgtcacgttggcttgactgtgtcagtgttctagataatctaccaggtgtagtgtacagaaagaaatgttaccttgtgttctttagtaacgtttttaaatgtccgtggaaaggactttgaatcactggaagtccaatcttggttccaaactgtgttactttatgagaaacccgtgttggtttgactattcattaacgaaaagaatttgtatcttgataggtaatgagacatttgagaagattgggatcatagggacattatcaaaccttctagtgtacctaactcaagtattcaaccttaagaaatacacagctgcaactattatcaatgccttcagtggcactatcaacttcggcactttcttcgctgcttttctgtgtgacacttactttggccgctacaagactctcagtgtggctgtcatcgcttgttttctggtactaatgctgctgatcttaatgggttttttttcttacgccaagactcttaatgctgatcatttttcgtctgtgtagggatcggtttttatactaatgacggctgcagttccgggattgcacccgactccttgtggaactaaaagttcgtgccaagggccaaatggggggcaggttttgtttctgctgttgggtttagcgcttctcgtagtcggtgctggtggtatcaggccgtgtaatttggcctttggagctgatcagttcaaccccaagtcagaatctggaaagaaaggaatcaacagtttcttcaactggtacttcttcactttcacgtttgcgcagatcatctcgctcacgctagttgtgtatatccagtcaaacgtgagctggaccattggtttgagtatccctgtgggtctaatgttcttggcctgcgtcatttactttgctggccataatctctacgtaaaagtgaaagcctcgggtagtcccttggctggcatcgctcgtgttatagctgcagcgatcaagaaacgagggttgaagcctgttaagaagccttgctccgatctttacaatcacatcccgcctaactatgcaaactctacactcaaatactccgaccagtttaggtaaaattcaaaaagtttctctctctctctctctgttgctttatgttttgttttgatgaaaacatgttacgttgctagatttctcgacaaagcagcagtcatgacccctgatgacaagttgaaacccgatggaacggcttcagatccatggaatctatgtacgatgcagcaggtggaagaagtgaaatgcattgtaagagtgattccaatctggtttgcttgcgcggtgtactacctcgcaataacattgcaaatgacttatccggtcttccaagcgctccagagcgaccggagattgggttcagatggcttcaagattccaggcggcacctatgtagtgttcttgatgtccggtatgacggttttcatcatattctacgaccgtgtccttgtcccgtcgctcagaagagtgacagggctagacaatggtataactctcttacaaagaatcggatcaggcattttctttgcgcttttgagtatgttgatttctgggttcgttgaggaacggcgaagagccattgcactgacaaaacctactctcgggatcgagcctcgagctggagaaatctcatcaatgtcagcgatgtggctgataccgcagctcgtgcttgcagggatagctgaagcttttgcagctgttggacaaatggagttttactacaagcagtttcctgaaaacatgaagagctttgcgggttctatcttctatgtcggtggaggagtttctagctacctcgctagcttcttgatctcgactgttcataaaacaactgagcattcacgctccgggaattggctagctgaggatctgaacaaagggaagctggattacttttatttcatgatcactggcctcatgtttgttaacatgggttacttcttgttaatggctaaattttatagatacaaagtcactaacgatgaagcaaattctgtgattaagacttatgaagaagagaccaaggagaatcaacaacaagacaagagctatgtctga

SEQ ID NO: 54 - protein, 615 aa, Brassica oleracea
MERKPFEVETTEDHKPYSDGGGSDLTSTVDSSGDEQKKLVYRGWKVMPYIIGNETFEKIGIIGTLSNLLVYLTQVFNLKKYTAATIINAFSGTINFGTFFAAFLCDTYFGRYKTLSVAVIACFLGSVFILMTAAVPGLHPTPCGTKSSCQGPNGGQVLFLLLGLALLVVGAGGIRPCNLAFGADQFNPKSESGKKGINSFFNWYFFTFTFAQIISLTLVVYIQSNVSWTIGLSIPVGLMFLACVIYFAGHNLYVKVKASGSPLAGIARVIAAAIKKRGLKPVKKPCSDLYNHIPPNYANSTLKYSDQFRFLDKAAVMTPDDKLKPDGTASDPWNLCTMQQVEEVKCIVRVIPIWFACAVYYLAITLQMTYPVFQALQSDRRLGSDGFKIPGGTYVVFLMSGMTVFIIFYDRVLVPSLRRVTGLDNGITLLQRIGSGIFFALLSMLISGFVEERRRAIALTKPTLGIEPRAGEISSMSAMWLIPQLVLAGIAEAFAAVGQMEFYYKQFPENMKSFAGSIFYVGGGVSSYLASFLISTVHKTTEHSRSGNWLAEDLNKGKLDYFYFMITGLMFVNMGYFLLMAKFYRYKVTNDEANSVIKTYEEETKENQQQDKSYV

SEQ ID NO: 55 - DNA, 2393 bp, Brassica oleracea
  CDS (1)..(157)
  CDS (526)..(743)
  CDS (836)..(1389)
  CDS (1484)..(2390)
atggagagaaagcctctagaagtcgagtcaacggatcaccaaaagcccccctccgccgtgtacgatggctctgttatggcggttgattctgttgaggaagaagttggggagaccaaagtcgtttacagaggctggaaagtcatgccctttatcattggtaacacaaacttttttttataaactttcttcttttgttccaagaaaaaaagactattttttattgcttttcatgttttttccaaaataaataatcaatagtcagaagaaatgaagaggaaaacatcagtcttgctattggtttgatttttaaaaaaaaaattcgtgagattctctgtactgttgtcaaaagctttgacttagtcaaccagtttttcaagaaaattaaaaaaagagagtgagatctagaatttgagaaggtttcagaacataactgatcaagaatcaactgtatgattcatgcaaagcttgaggcatatgagatcaaagtcttatgatcatcttggttttgtttgttggtatcatcaggaaatgagacgttcgagaagcttgggatcattggaacactatcaaaccttttggtttatttaactgccgtcttcaacatgaagagtatcacagctgcaacaatcatcaatgcattcagtggcacaatcaacttcggaaccttcgttgctgctttcctctgcgacacttacttcggtcgatacaagactctaaccgtcgctgtcatcgcctgttttcttgtaatgatcattcctttgcaatctttcttgctccacaagcgttcttagtttaacaaccgtaaaaatctgataattgttgttcttttttgtagggatcacttgtgatactattgacagctgcagtgccacaattacatccagctccatgcggaacagctctctcatgtatcgggccaagtggcggccagatagcgtttctactgctgggtctcggctttcttgtagttggagcaggcgggattagaccatgtaatctagctttcggggctgatcagtttaaccccaagagcgagtcaggaaaacgaggcatcgatagtttcttcaattggtacttcttcaccttcacgttcgcgcagatcctgtcgctgacactaatcgtctatatccagtccaatgtcagctggaccatcggtttaaccatcccggtcgttctcatgttcttggcctgcgtgattttctttgctggagataagttgtatgtgaagatcaaagcctcaggtagtccattggctggtatagctcaagttatagcggttgcaatcaagaaacgtgggttaaagccaacgaaagagccttggcttaacctttacaactactacccaccaaaatacgcaaactccaaactcaaatacaccgaccagtttaggtaacaaaacacacacacgccaagagttagttttatctttaatatctttccacttttgttatatggttactgagaaagtttcctgttttggcaggtttcttgataaggctgcgatcttggctccggaagacaagttggaggctgatggtaagcctgcggatccatggaagctttgtacaatgcaacaagttgaagaagtgaagtgcattgtgagagtgcttcctatatggtttgctgcatccatctattacttaaccatcacgcaacaaatgacttaccccgttttccaagccctccagagcgaccgtcgcttaggatccagaggattcgtgatcccggcagccacctacgttgtcttcttgatgacaggaatgacggttttcatcatattctacgaccgtgtgctcgtgcctaccttaagaagaataaccggtatagacacggggataacgctcttgcagaggattggaaccggtattttcttcgcctttgttagcttgatagtctcaggtttcgtcgaggaacggaggagaacgttcgcgctgactaaaccaacacttggtatggctccaaggaagggagaaatctcctcaatgtcagctatgtggctgatcccacaactcgcccttgcgggtatagccgaggcgtttggagctattggacagatggagttttactacaagcaattccctgagaacatgaggagttttgctggttcgatcttctatgtaggagcaggagtttcaagctacctcggtagcttcttgattgcaatggttcacaggacgacgcagaactcggctggtggtaattggttagctgaggatttgaacaaaggaagattggattacttctatttcatgatcgctggaatcttggcggttaattttgcttacttcttggtcatgtcaagatggtatagatacaaaggaagtgatgatgaagtgacaacttatgaaaccaatggagatgctatcaaacaacaagacaagaatactgtctga

SEQ ID NO: 56 - protein, 612 aa, Brassica oleracea; identical to SEQ ID NO: 32

SEQ ID NO: 57 - DNA, 2396 bp, Brassica oleracea
  CDS (1)..(157)
  CDS (550)..(767)
  CDS (858)..(1411)
  CDS (1487)..(2393)
atggagagaaatcctctggaagttgagtccaccgatcatcagaaaccttcctccgccgtgtacgacggctctgctacggcggttgattctgttgaagaagaagttcaggaaaccaaactcgtttatagaggctggaaagtcatgcctttcatcataggtaacacatatgtttaaaacatattaaaaatataaatttttgataaaaaaaatatatcatcttctttgaatggtatatttccaaagttttagaaactatatttctagaaatttcctgtaattaaattttgacaattttcttctctgtttctagaaactatattttgttggtttcatgagttgttggtttgattttattattggtgatattctttgtgttgttgtcttaagctttgacttagtcaaacagtaatttaacccaaaagagtgagatcttgagtttgaagatgtttcagaacacataaatgatcaagaatcacttgtttgattcttcgtttggtttctaaggtcaaagtcttatgatcttttcttcttgcatgttgttattaccaggaaacgagacatttgagaagcttgggatcattggaacactatcaaaccttctggtttacttaactgctgtcttcaacatgaagagtatcacagccgcaacaatcatcaacgcctttagcggcacaatcaacttcggaaccttcgttgctgccttcctttgcgacacttacttcggccgttacaagacactaaccgtcgcggtcatcgcatgttttcttgtaataatccatcctctataaccttttcttcctccacaagcaatcttggtttataacctaaaaaaaaaaatctgattcttgttttggtagggatcacttgtgatactattaactgctgcagtaccacaactgcatccagctccatgcggaacagccctcacgtgtacaggcccaagtggtggccagatagcctttctactaatgggtcttgcctttcttgtggtgggagcaggtgggattagaccgtgtaatcttgcttttggagctgatcagtttaaccctaaaagcgagtcagggaaaagagggattgatagtttctttaactggtacttcttcaccttcacgttcgcgcagatcttgtctctgacactagttgtctacatccagtctaacgtcagttggaccatcggtttaaccatcccggtcgtgttaatgttcttggcctgtgtgatcttctttgcgggtgataagttgtatgtcaagatcaaagcctcaggtagtccattggctagtatagctcaagttataacggttgctatcaagaaacgtgggttaaaggctgtgaagcagccttgggttaacctttacaattactacccactaaactacgcaaactccaagctcaagtacactgaccagttcaggtaaaagacacacagttaacaataatatctttccacttttgtttacttagaaagcaagctttctatttttggcaggtttcttgataaggcggcgatattggctcctgaagacaagttggaggctgatggtaaacctacggatccatggaagctatgtacaatgcaacaagttgaagaagtgaagtgcattgtgagagtgcttcctatatggtttgcttcatcaatctattacttgaccatcacgcaacaaatgacttatccagtcttccaagccctccagagcgatcgtcgcttaggctctggagggtttgtgattcctgcagccacctatgtggtcttcttgatgacgggaatgactgttttcatcataatctacgaccgcgtcctcgtgcctaccttgaggagaatcaccggtatagacaccgggatcacgctcttgcaaaggataggaactgggattttcttcgcctttttgagcttggtagtgtccggtttcgtcgaggaacggaggaggaccttcgcgttgactaaaccaacactcggtatggcgccacggaagggagaaatctcctcaatgtcagctatgtggctgataccgcagctcacactcgcgggtgtagccgaggcgtttggagccatcggacagatggagttttattacaagcagttccctgagaacatgaggagtttcgccggttccatcttctatgtgggaggaggagtttcgagttacctcggtagcttcttgatcgcaacggttcacaggacgacgcagaactcggctggcggtaactggttagctgaagatttgaacaaagggagattggatttgttttacttcatgatagctggaatcttggcggttaattttgcttacttcttggtgatgtcaagatggtataggtacaaaggaagtgatgatgaagtgacagcttatgaaacaaatggagatgtgatcaaacaacaagacaagaacaaagtctaa

SEQ ID NO: 58 - protein, 612 aa, Brassica oleracea
MERNPLEVESTDHQKPSSAVYDGSATAVDSVEEEVQETKLVYRGWKVMPFIIGNETFEKLGIIGTLSNLLVYLTAVFNMKSITAATIINAFSGTINFGTFVAAFLCDTYFGRYKTLTVAVIACFLGSLVILLTAAVPQLHPAPCGTALTCTGPSGGQIAFLLMGLAFLVVGAGGIRPCNLAFGADQFNPKSESGKRGIDSFFNWYFFTFTFAQILSLTLVVYIQSNVSWTIGLTIPVVLMFLACVIFFAGDKLYVKIKASGSPLASIAQVITVAIKKRGLKAVKQPWVNLYNYYPLNYANSKLKYTDQFRFLDKAAILAPEDKLEADGKPTDPWKLCTMQQVEEVKCIVRVLPIWFASSIYYLTITQQMTYPVFQALQSDRRLGSGGFVIPAATYVVFLMTGMTVFIIIYDRVLVPTLRRITGIDTGITLLQRIGTGIFFAFLSLVVSGFVEERRRTFALTKPTLGMAPRKGEISSMSAMWLIPQLTLAGVAEAFGAIGQMEFYYKQFPENMRSFAGSIFYVGGGVSSYLGSFLIATVHRTTQNSAGGNWLAEDLNKGRLDLFYFMIAGILAVNFAYFLVMSRWYRYKGSDDEVTAYETNGDVIKQQDKNKV

SEQ ID NO: 59 - DNA, 2379 bp, Brassica oleracea
  CDS (1)..(157)
  CDS (332)..(549)
  CDS (638)..(1191)
  CDS (1470)..(2376)
atggagagaaagtctctcgaagtcgagtctatgaatcaccaaaaactttcctccgccgtgtacgatggctctgttacggccgttgattctgttaaagaagatgttcaggagaccaaagtcgtttatagaggctggaaagtcatgcctttcatcattggtaacgcaataatattatcatttacggtgctcaactttcttcttttgaatgctaaaagaaaactttcttcttttggaaactatttcttttgtcgttttgttgtcttaagttttcaattagtcagaatattgaagtcttatgatcttggttaatttttgttgttgttaccaccaggaaatgagacatttgagaagcttgggatcattggaacactatcaaaccttctggtttacttaacttctgtcttcaacatgaagagtgttacagctgcaacaatcatcaatgcctttgctggcacagtcaactttggaactttcgttgctgctttcctttgcgacacttacttcggtcgatacaagactcttaccgtcgcggtcctcgcctgttttcttgtaaaaattcatcccctctaactatttcttactctacaagcaatcttggtttataacctaaaaataaaatctggttcttgttttgtagggatcacttgcgatactattgactgctgcagtcccacaactacatccagccccatgcggcacagcgagctcgtgtagcgggccaagtggtggccagatagcgtttctactgatgggtcttgggattcttgtggtgggagcaggagggattagaccgtgcaatctagctttcggagctgatcagtttaatccgaagagcgggtcagggaaaagagggattgatagtttcttcaactggtacttcttcaccttcactttcgcgcagatcttgtctctgacagtagttgtctatgtccagtctaatgtcagttggaccatcggtttaaccatcccggttgttctaatgttcttggcctccgtgattttctttgcgggtgctaagttgtatgttaagatcgaagcctcaggtagtccattggctagtatagctcatgttataacggctgctatcaagaaacacgggttaaagtcagtggaacagccttggctgaacctttacaactactacccatcaaaacacgcaaacgccaagctcaaatacaccgaacaattcaggtaaacacacttttaaaccggtaaaaaccaccgtttatacttgatatatatatatatatatatttttttttttcttttgaatgaatgttaaaattattcatatcaaaacatttttacaatgactgcatctatagttgatatatatctatatataatttgactcaataaagaactcaaaaacattcggtaaaaacattgtttatcaacacacctaaaactagtcttggtttgtcttttctgatgctttatttttactgagagagattcatactcggcaggtttctcgacaaggcggcgatcttgactcctgaagacaagttggatgctgatggtaagcctgtgaatccgtggaatctatgtacaatgcaacaggttgaagaagtgaagtgcatcatgagagtgcttcctatatggtttgcttcatcgatctactacttaaccatcgcgcaacaaatgacttatcctgtcttccaagctctccagagtgatcgtcgcttaggctctggaggtttcatgatcccggcagccacctatgttgtcttcttgatgactggcatgaccctcttcatcatattttatgaccgtgtattggttcctacattaaaaagaataaccggtatagagacgggtataacgctcttgcaaagaattggagccgggattttcttcgccttgttaagcttaattatctctggtttcgtcgaggaacataggagaacctcagcactaactaaaccgacactcggtttagcgccacggaagggagaaatctcctcaatgtcggctatgtggctgattccgcagcttgtacttgctggtatagccgacgcatttggagctattggacagatggagttttactacaagcagttccctgagaacatgaggagtttcgctggttctatcttttacgtaggagcaggagtttcgagttacatcagtagcttcttgatcacaacggttcacaggatgacgcagaactcggcgggtggtaattggttagctgaggatttgaacaaaggaagattggattacttctatttcttgttagctggaatcttggcagttaattttgcttacttcttggtgatggcaagatggtataggtacaaaggaagtgatgatgaagagacaagttatgaaaccagtggagatatcatcaaagaacaagacaagaacaaagtctga

SEQ ID NO: 60 - protein, 612 aa, Brassica oleracea
MERKSLEVESMNHQKLSSAVYDGSVTAVDSVKEDVQETKVVYRGWKVMPFIIGNETFEKLGIIGTLSNLLVYLTSVFNMKSVTAATIINAFAGTVNFGTFVAAFLCDTYFGRYKTLTVAVLACFLGSLAILLTAAVPQLHPAPCGTASSCSGPSGGQIAFLLMGLGILVVGAGGIRPCNLAFGADQFNPKSGSGKRGIDSFFNWYFFTFTFAQILSLTVVVYVQSNVSWTIGLTIPVVLMFLASVIFFAGAKLYVKIEASGSPLASIAHVITAAIKKHGLKSVEQPWLNLYNYYPSKHANAKLKYTEQFRFLDKAAILTPEDKLDADGKPVNPWNLCTMQQVEEVKCIMRVLPIWFASSIYYLTIAQQMTYPVFQALQSDRRLGSGGFMIPAATYVVFLMTGMTLFIIFYDRVLVPTLKRITGIETGITLLQRIGAGIFFALLSLIISGFVEEHRRTSALTKPTLGLAPRKGEISSMSAMWLIPQLVLAGIADAFGAIGQMEFYYKQFPENMRSFAGSIFYVGAGVSSYISSFLITTVHRMTQNSAGGNWLAEDLNKGRLDYFYFLLAGILAVNFAYFLVMARWYRYKGSDDEETSYETSGDIIKEQDKNKV

SEQ ID NO: 61 - DNA, 2556 bp, Arabidopsis thaliana
  CDS (1)..(127)
  CDS (694)..(911)
  CDS (992)..(1545)
  CDS (1635)..(2553)
atggagagaaagcctcttgaggttgagccatctactacgacgactaacaccgatgtggtcgattctttcgaggaagagcagagaaaaatcgtttatagaggatggaaagtcatgccttttatcattggtaacgctcctttttacttgtttgtgtctaattcagacatcatttttttcttttggggtgctttgtcggattttagggaagtgtaacattttgtccgtgatgtttttaaatttcgtttcttttctcttctctttgacttgactctgtcaaaaatctcgaatttggagttctttctctgagatttcgaagtgaaattggttttaaaactgagatttcgttgaaacaatgaaacccagataatcttacagatctgtctaatggaaattatattttttacaattgttttcattttattttcaaagagacttttgaaatctttaacacaaaaaacagagactttaaatcatgcagttaagtttctgaaaaaagtagataagatttttgtgaatttctggataagacaaaattagtttatgggagttacaaaacagttataaagtttcatgtgaaccaaagtcagaacattggaagtccaaactttgatttgtgtgtttccttgtacattaaatgtaaaaaaaaaactgtaactgtattcttaatttcttatcattaatttgctattgtaggtaatgagacatttgagaagcttgggatcatagggacattatcaaaccttcttgtgtacctaacttctgtattcaaccttaagagctacacagctgcaactatcatcaatgcctttagtggtacaatcaatttcgggacttttattgctgcctttctttgcgacacttactttggtcgctacaagactctcagtgtcgctgtcatcgcttgttttctggtactacttttatatataatctttcatgactccggtttcgttttcgccaatgttttctaaaccatttttcatctctgtagggatcgtttgtgatactacttactgctgcaattccgtcgttgcaccccgttgcttgcggaaacaaaatctcgtgcgaagggccaagtgtgggacagatactgtttctgctcatgggtttaggctttcttgtggtaggcgctggtggtatcagaccgtgtaatttagcgtttggtgctgatcagttcaaccccaaatccgaatcaggaaagaaagggatcaacagtttcttcaactggtatttcttcactttcacgttcgcgcagatcatctcgctcacagcagttgtgtatatccagtcaaatgtgagttggacaatcggtttgatcattccggtggctcttatgttcttggcgtgtgtgattttctttgctggcgatagattgtatgtaaaagtgaaagcctcgggtagtccattggctggtattgctcgtgttatagcagccgcgatcaagaaacgaggtttgaagccggttaagcagccttgggtcaatctttacaaccatatcccgtctaactatgcaaatactactctaaaatacaccgaccagttcaggtaaattgatatctacttattcttggttctcttgctttatgtttctggcttttgttttgctgaaaaatgtttgtttattatgttgccagatttctagacaaagcagcaattatgacccccgaggagaagttgaactccgatggaacggcttccgatccatggaaactatgcacgttgcagcaagtggaagaagtgaaatgcattgtaagagtgattccaatctggtttgcatccacgatatactaccttgcaataactatacaaatgacttatccggtcttccaagcgctccagagcgaccgacgattaggttctggtggcttcaggattcctgcggccacctatgtagtgttcttgatgactggcatgacagttttcatcatattctacgaccgtgtacttgtcccgtcgctcagaagagtgaccgggttagaaaccggtatatcactcttacaaagaatcggagctgggtttacatttgcgataatgagtttattagtttccgggtttatagaggaaaggagaagaaactttgcattgaccaaaccgacactcgggatggcgcctcggacaggagaaatctcatcaatgtcagcgttgtggctgattccgcagcttacacttgcaggcatagcagaagcttttgctgccattggacaaatggagttttactacaagcagtttcctgaaaacatgaagagcttcgcgggttctatcttttatgtcggtgcaggggtttcgagctacctcgctagcttcttgatatcaactgttcatcgaacaaccgcgcattcaccttcagggaattggttagctgaggatctgaacaaagcgaaattggattacttctacttcatgctcacaggactcatggttgttaacatggcttacttcttgttgatggctagatggtatagatacaaaggaggtaatgatgaagacatcactgagattgagaccaatgaagaagaaaccaagcaacagcagctacaagacaagaactctgtctga

SEQ ID NO: 62 - protein, 606 aa, Arabidopsis thaliana; identical to SEQ ID NO: 2

SEQ ID NO: 63 - DNA, 2393 bp, Arabidopsis thaliana
  CDS (1)..(163)
  CDS (532)..(749)
  CDS (841)..(1400)
  CDS (1484)..(2390)
atggagagaaagcctcttgaacttgagtcgacggataaccaccagaatccttcctccgccgtatacggtggctctgttacggcggttgactctgttgaagaagatgttcagaatcagaagaaagtcgtttatagaggctggaaagtcatgccctttattattggtaacactaatttgatcatttgcttttcttttttgtgtccaagaagctgttttttctgttggtttcatgaagtttgggaatatccagaaaaactgtttaaaaaataaatctataagaaaaacataagtcttgctcgaagacttgtttctctgagcaaggagagttttgttagattctctgtgttgtctgaaagtttgacttagtcaacggtaatttaagacaaaaaagagtgagatgtcgaattttgtctaagattttagaacatatttggtcaacgatcaataagaaagtagaaacacaaatttcatctagttcttgattcttggtatggtgtctgattatgatcttgtacatgttgttgttatcaggaaatgagacatttgagaagcttgggatcattggaacactatcaaaccttctggtttatttaactgcagtcttcaacctgaagagtattacagctgcaaccatcattaacgcctttagtggcacaattaatttcggaactttcgttgctgcttttctctgtgacacttacttcggtcgatacaagactctaagtgtcgcggtcatcgcatgttttcttgtaacgatccttcctcttttttaatattttctttctctacaacattcggtttaaagtcaaacaaatctgatcagtaaattcggttttgtagggatcatttgtgatactattgactgcagcagtgccacaactgcatccagctgcatgtggaacagcggcggatagcatatgtaacgggccaagtggaggccagatagcgtttctactgatgggtctcgggttccttgtagtgggagcgggcggtattagaccgtgtaacttagcttttggggctgatcagtttaacccgaaaagcgaatcagggaaaagagggattgacagtttctttaattggtatttctttaccttcactttcgcgcagatcctgtcgctgactctagtcgtctacgttcagtctaatgtcagttggacgatcggtctaaccatccctgccgttctaatgtttttggcctgcttgattttctttgcgggcgataagttgtatgtgaagatcaaagcctcgggtagtccattggccggtatagctcaagttatagcggttgcgatcaagaaacgcggattaaagcccgcgaaacagccttggcttaacctttacaattactacccaccaaaatacgcaaactccaagctcaaatacacagaccaattcaggtaaaaaaaacacaccccatgaatagtattttcactttctttatatgttttatgttactgaaaaaaactttcctatttggcagatttcttgataaagccgctatcttgactcctgaagacaagttgcagccagatggtaagcctgctgatccttggaagctctgtacaatgcaacaagttgaagaagtgaagtgcatcgtgagagtgcttcctatatggtttgcatcatcaatttactacttaaccataactcaacaaatgacttatcccgtcttccaagcccttcagagcgaccgtcgcttaggctcaggaggttttgtgattcccgcagccacctacgtggttttcttgatgacgggaatgacagttttcatcgtagtctacgaccgtgtacttgtgccaaccatgagaagaattactggtctagacaccgggataacgctcttgcagagaattggaactggcattttcttcgctaccgcgagtttagtagtcgcgggatttgtcgaggaacgaaggagaacattcgctctgactaaaccaacactcggtatggcgccaagaaagggagaaatctcgtcgatgtcagctatgtggctgattccgcagctctcactggcgggtgtagcagaggcatttgcagccattggacaaatggagttttactacaagcagtttcccgagaacatgaggagtttcgctggatccatcttttacgttggaggaggagtttcgagttaccttggtagcttcttgattgcaacagttcacaggacaacacagaactcgtcagggggtaactggttagctgaggatttgaacaaaggaagattggatctcttctatttcatgatcgctggaatcctggcagttaattttgcttatttcttggtgatgtcaagatggtataggtacaaaggaagtgatgacgaagtgacaacatatgaaaccaatgaaaatatcatcaaacagcaagacaagaacgttgcctga

SEQ ID NO: 64 - protein, 616 aa, Arabidopsis thaliana; identical to SEQ ID NO: 4

SEQ ID NO: 65 - DNA, 2371 bp, Brassica rapa
  CDS (1)..(157)
  CDS (525)..(742)
  CDS (833)..(1386)
  CDS (1462)..(2368)
atggagagaaagcctctggaagttgagtccaccgatcatcagaaaccttcctccgccgtgtacgacggctctgctacggcggttgattctgttgaagaagaagttcaggaaaccaaactcgtttatagaggctggaaagtcatgcctttcatcataggtaacgcatatgtttttaaacatattaaaaatataaatttttgataaaaaaataaatcattttctttgattggtatatttccaaagttttagaaactatatttctagaaatttcctgtaattaaattttgacaattttcttctctgtttctagaaactatattttgttgctttgattttatcattctttgtgttgttgtcttaagctttgacttagtcaaacagtaatttaacccaaaagagtgagatcttgagtttgaagatgtttcagaacacataaatgatcaagaatctcttgtttgattcttcgtttggttgctaaggtcaaagtcttatgatcttttcttcttgcatgttgttattaccaggaaacgagacatttgagaagcttgggatcattggaacactatcaaaccttctggtttacttaactgctgtcttcaacatgaagagtatcacagccgcaacaatcatcaacgcctttagtggcacaatcaacttcggaaccttcgttgctgccttcctttgcgacacttacttcggtcgttacaagacactaaccgtcgcggtcatcgcatgttttcttgtaataatccatcctctataaccttttcttcctccacaagcaatcttggtttataaacctaaaaaaaaaatctggttcttgttttggtagggatcacttgtgatactattaactgctgcagtaccacaactgcatccagctccatgcggaatagccctcacgtgtacaggcccaagtggcggccagatagcctttctactaatgggtcttgcctttcttgtggtgggagcaggtgggattagaccgtgtaatcttgcttttggagctgatcagtttaaccctaaaagcgagtcagggaagagagggattgatagtttctttaactggtacttcttcaccttcacgttcgcgcagatcttgtcgctgacactagttgtctacatccagtctaacgtcagttggaccatcggtttaaccatacctgtcgtgttaatgttcttggcctgcgtgatcttctttgcgggtgataagttgtatgtcaagatcaaagcctcaggtagtccattggctagtatagctcaagttataacggttgctatcaagaaacgtgggttaaaggctgtgaagcagccttgggttaacctttacaattactacccactaaactacgcaaactctaagctcaagtacaccgaccagttcaggtaaagacacacggttataaataatatctttccacttttgtttacttagaaagcaagctttcttttttttggtaggtttcttgataaggcggcgatcttggctcctgaagacaagttggaggctgatggtaagcctacggatccatggaagctatgtacaatgcaacaagttgaagaagtgaagtgcattgtgagagtgcttcctatatggttcgcttcatcaatctattacttgaccatcacacaacaaatgacctacccagtcttccaagccctccagagcgatcgtcgcttaggctctggagggtttgtgattcctgcagccacctatgtggtcttcttgatgacgggaatgactgttttcatcataatctacgaccgcgtactcgtgcctaccttgagaagaatcaccggtatagacaccgggatcacgctcttgcaaaggataggaaccgggattttcttcgcctttttgagcttggtagtgtctggtttcgtcgaggaacggaggaggactttcgcattgactaaaccaacactcggtatggcgccacggaagggagaaatctcctcaatgtcagctatgtggctgataccgcagctcacactcgcgggtgtagccgaggcatttggagctattggacagatggagttttactacaagcagttccccgagaacatgaggagtttcgccggctccatcttctatgtgggaggaggagtttctagttacctcggcagcttcttgattgcaacggtacacaggacgacgcagaactcggctggcggtaactggttggctgaagatttgaacaaaggaagattggatttgttttacttcatgatcgctggaatcttggcggttaattttgcttacttcttggtgatgtcaagatggtataggtacaaaggaagtgatgatgaagtgacagcttatgaaacaaatggagatgtgatcaaacaacaagacaagaacaaagtctaa

SEQ ID NO: 66 - protein, 612 aa, Brassica rapa
MERKPLEVESTDHQKPSSAVYDGSATAVDSVEEEVQETKLVYRGWKVMPFIIGNETFEKLGIIGTLSNLLVYLTAVFNMKSITAATIINAFSGTINFGTFVAAFLCDTYFGRYKTLTVAVIACFLGSLVILLTAAVPQLHPAPCGIALTCTGPSGGQIAFLLMGLAFLVVGAGGIRPCNLAFGADQFNPKSESGKRGIDSFFNWYFFTFTFAQILSLTLVVYIQSNVSWTIGLTIPVVLMFLACVIFFAGDKLYVKIKASGSPLASIAQVITVAIKKRGLKAVKQPWVNLYNYYPLNYANSKLKYTDQFRFLDKAAILAPEDKLEADGKPTDPWKLCTMQQVEEVKCIVRVLPIWFASSIYYLTITQQMTYPVFQALQSDRRLGSGGFVIPAATYVVFLMTGMTVFIIIYDRVLVPTLRRITGIDTGITLLQRIGTGIFFAFLSLVVSGFVEERRRTFALTKPTLGMAPRKGEISSMSAMWLIPQLTLAGVAEAFGAIGQMEFYYKQFPENMRSFAGSIFYVGGGVSSYLGSFLIATVHRTTQNSAGGNWLAEDLNKGRLDLFYFMIAGILAVNFAYFLVMSRWYRYKGSDDEVTAYETNGDVIKQQDKNKV

SEQ ID NO: 67 - DNA, 29 bp, Artificial
  oligonucleotide
ggcttaatatggagagaaagcctctggaa

SEQ ID NO: 68 - DNA, 29 bp, Artificial
  oligonucleotide
ggtttaatttagactttgttcttgtcttg

SEQ ID NO: 69 - DNA, 20 bp, Artificial
  oligonucleotide
acgcctttagtggcacaatc

SEQ ID NO: 70 - DNA, 20 bp, Artificial
  oligonucleotide
cccgtcatcaagaagaccac

SEQ ID NO: 71 - DNA, 20 bp, Artificial
  oligonucleotide
gcagtaccacaactgcatcc

SEQ ID NO: 72 - DNA, 20 bp, Artificial
  oligonucleotide
gtgaagcagccttgggttaa

SEQ ID NO: 73 - DNA, 20 bp, Artificial
  oligonucleotide
ttaacccaaggctgcttcac

SEQ ID NO: 74 - DNA, 31 bp, Artificial
  oligonucleotide
atcgcatgttttcttagatcacttgtgatac

SEQ ID NO: 75 - DNA, 32 bp, Artificial
  oligonucleotide
aacatgcgatgaccgcgacggttagtgtcttg

SEQ ID NO: 76 - DNA, 33 bp, Artificial
  oligonucleotide
agaacagctctcacgtgtacaggcccaagtggc

SEQ ID NO: 77 - DNA, 32 bp, Artificial
  oligonucleotide
agctgttctgcatggagctggatgcagttgtg

SEQ ID NO: 78 - DNA, 31 bp, Artificial
  oligonucleotide
aaagcaagtcagggaagagagggattgatag

SEQ ID NO: 79 - DNA, 30 bp, Artificial
  oligonucleotide
acttgcttttagggttaaactgatcagctc

SEQ ID NO: 80 - DNA, 30 bp, Artificial
  oligonucleotide
agttagaccatcggtttaaccatacctgtc

SEQ ID NO: 81 - DNA, 30 bp, Artificial
  oligonucleotide
atggtctaactgacgttagattggatgtag

SEQ ID NO: 82 - DNA, 29 bp, Artificial
  oligonucleotide
attcatctattacttgaccatcacacaac

SEQ ID NO: 83 - DNA, 30 bp, Artificial
  oligonucleotide
atagatgaatgaagcgaaccatataggaag

SEQ ID NO: 84 - DNA, 33 bp, Artificial
  oligonucleotide
ggcttaatatggagagaaagcctcttgaacttg

SEQ ID NO: 85 - DNA, 32 bp, Artificial
  oligonucleotide
ggtttaattcaggcaacgttcttgtcttgctg

SEQ ID NO: 86 - DNA, 34 bp, Artificial
  oligonucleotide
ggcttaatatggacaatgagaaagggacaagttc

SEQ ID NO: 87 - DNA, 28 bp, Artificial
  oligonucleotide
attccctatgatataaggcatcgctttc

SEQ ID NO: 88 - DNA, 29 bp, Artificial
  oligonucleotide
atagggaatgaaacattggagaggcttgc

SEQ ID NO: 89 - DNA, 33 bp, Artificial
  oligonucleotide
atgcccaacaactcagcgatggaaccgaagaca

SEQ ID NO: 90 - DNA, 34 bp, Artificial
  oligonucleotide
agttgttgggcatgttggtgttgactttcacgtc

SEQ ID NO: 91 - DNA, 29 bp, Artificial
  oligonucleotide
atctgaattgatcagtgagtacgagttta

SEQ ID NO: 92 - DNA, 30 bp, Artificial
  oligonucleotide
aattcagattcttgaacaaagctgtgatag

SEQ ID NO: 93 - DNA, 38 bp, Artificial
  oligonucleotide
ggtttaatttattgttcattactatagtttctgtaacg

SEQ ID NO: 94 - DNA, 33 bp, Artificial
  oligonucleotide
ggcttaatatggttttggaggatagaaaggacg

SEQ ID NO: 95 - DNA, 33 bp, Artificial
  oligonucleotide
ggtttaattcatttcatcgatttcttcgaagtc

SEQ ID NO: 96 - DNA, 43 bp, Artificial
  oligonucleotide
aattaaccctcactaaagggttgtaatacgactcactataggg

SEQ ID NO: 97 - DNA, 49 bp, Artificial
  oligonucleotide
tttttttttttttttttttttttttttttatactcaagctagcctcgag

SEQ ID NO: 98 - DNA, 21 bp, Artificial
  oligonucleotide
tcccgaaattgattgtaccac

SEQ ID NO: 99 - DNA, 21 bp, Artificial
  oligonucleotide
acagccaaattcacaccattc

SEQ ID NO: 100 - DNA, 21 bp, Artificial
  oligonucleotide
cgggagcttcacacacttaag

SEQ ID NO: 101 - DNA, 21 bp, Artificial
  oligonucleotide
taaaccaccactcggtatggc

SEQ ID NO: 102 - DNA, 21 bp, Artificial
  oligonucleotide
ctagcgtcggttttgtgagag

SEQ ID NO: 103 - DNA, 21 bp, Artificial
  oligonucleotide
aaataggaagcgtgtgcaatg

SEQ ID NO: 104 - DNA, 25 bp, Artificial
  oligonucleotide
gcagccttgggtcaatctttacaac

SEQ ID NO: 105 - DNA, 24 bp, Artificial
  oligonucleotide
gggggtcataattgctgctttgtc

SEQ ID NO: 106 - DNA, 23 bp, Artificial
  oligonucleotide
taagtgtcgcggtcatcgcatgt

SEQ ID NO: 107 - DNA, 24 bp, Artificial
  oligonucleotide
aggaacccgagacccatcagtaga

SEQ ID NO: 108 - DNA, 22 bp, Artificial
  oligonucleotide
tctcggttcggtggcaatggat

SEQ ID NO: 109 - DNA, 22 bp, Artificial
  oligonucleotide
ctctgtatggcccaatttcgag

SEQ ID NO: 110 - DNA, 32 bp, Artificial
  oligonucleotide
ggcttaatggttcttagactggcgagaaactg

SEQ ID NO: 111 - DNA, 32 bp, Artificial
  oligonucleotide
ggtttaatgtcaagcttctccgctcaattata

SEQ ID NO: 112 - DNA, 31 bp, Artificial
  oligonucleotide
ggcttaatcctcatagattgtcagtactatg

SEQ ID NO: 113 - DNA, 31 bp, Artificial
  oligonucleotide
ggtttaattttgtttgtctatatttttggct

SEQ ID NO: 114 - DNA, 41 bp, Artificial
  oligonucleotide
aggctgaggtttaatccgacagagttcttgtcttgtagctg

SEQ ID NO: 115 - DNA, 48 bp, Artificial
  oligonucleotide
acctcagcctgggtagcggtggaatggtgagcaagggcgaggagctgt

SEQ ID NO: 116 - DNA, 33 bp, Artificial
  oligonucleotide
agtttccagattacttgtacagctcgtccatgc

SEQ ID NO: 117 - DNA, 29 bp, Artificial
  oligonucleotide
atctggaaacttatatatttttggtattc

SEQ ID NO: 118 - DNA, 32 bp, Artificial
  oligonucleotide
ggtttaatgttgggtcatgaaggttgtgtctg

SEQ ID NO: 119 - DNA, 3466 bp, Brassica juncea
  CDS (623)..(779): exon 1
  CDS (1118)..(1335): exon 2
  CDS (1430)..(1983): exon 3
  CDS (2083)..(2989): exon 4
actaatggaatatagttcctatgatttatcgacgtaaagtaaaaaaatatctatataaatacataagatttatggaataaaaaagaacgaaatggatagaaataaaatgtcaaaataataaagaagaagaaggataaataaattaaaactggacgatggaaaataagtggacttaaaaattaaaatggacggagagcttaaaagaacgtgccgttattaagacagagtgtttacgaagggaccacacaacacttgtaatggaatctagattttcatggatttttagttctttttaactttttttttggatttttagtttttacaaagtttaatctcggaagaaaaagagaaaaaaaaccttcattaattaatgtttaatcaatattctaatcactaacacagctctctttcgtggccacattcacaaatgaccattttgtctagattccaacatctccacccaccatcctctttcttcttaccactataaatagagacaggtctaacaatgaagaacagagtcatcattagccttttagataacacaccatacatattataaagaaagtacaaattttaactactattttagtagttgtaactattatctcgagcagcaaaaatggagagaaagcctctagaagtcgagtcaacggatcaccaaaagcctccctccgccgtgtacgatggctctgttatggcggttgattctgttgaggaagaagttgaggagaccaaagtcgtttacagaggctggaaagtcatgccctttatcattggtaacacaaactttttttttataaactttcttcttttgttccaagaactttttttttaattgcttttaatgtttttttccaaaataaataatcaatagttgaagaaatgaagaggaaaacatcagtcttgcttgaagacttattggtttgatttaaaaaaaaaatcgtgagattctctgtactgttgtcaaaagctttgacttagtcaaccagttttttaagaaaattaaaaaaaagagagtgagatctagaatttgagaaggtttcagaacataactttgaggcatatgagatcaaagtcttatgatcatcttggttttgtttgttggtatcatcaggaaatgagacgttcgagaagcttgggatcattggaacactatcaaaccttctggtttatttaactgctgtcttcaacatgaagagtatcacagctgcaacaatcatcaatgcattcagtggcacaatcaacttcggaaccttcgttgctgctttcctctgcgacacttacttcggtcgatacaagactctaactgtcgctgtcatcgcctgttttcttgtaatgatccttcctttgcaatctttcttgctccacaagcgttcttagtttaacaaccctaaaaatctgataattgttgttcttttttttgtagggatcacttgtgatactattgacagctgcagtgccacaattacatccagctccatgcggaacagctctctcatgtatcgggccaagtggtggccagatagcgtttctactgctgggtctcgggtttcttgtagttggagcaggcgggattagaccatgtaatctagctttcggggctgatcagtttaaccccaagagcgagtcaggaaaacgaggcatcgatagtttcttcaattggtacttcttcaccttcacgttcgcgcagatcctgtcgctgacactaatcgtctatatccagtccaatgtcagctggacaatcggtttaaccatcccggtcgttctcatgttcttggcctgcgtgattttctttgctggagataagttgtatgtgaagatcaaagcctcaggtagtccattggctggtatagctcaagttatagcggttgcaatcaagaaacgtgggttaaagccaacgaaagagccttggcttaacctttacaactactacccaccaaaatacgcaaactccaaactcaaatacaccgaccagtttaggtaacaaaacacacacacgccaagagttagttttatatttaatatcatatctttccacttttgttttatggttactgaggaagtttcctgtttcggcaggttccttgataaggcggcgattttggctcccgaagacaagttggaggctgatggtaagcctgcggatccctggaagctttgtacaatgcaacaagttgaagaagtgaagtgcattgtgagagtgcttcctatatggtttgctgcatcgatctattacttgaccatcacgcaacaaatgacttaccccgtcttccaagccctccagagcgaccgtcgcttaggatccagaggatttgtgatcccggcagccacctacgttgtctttttgatgacaggaatgacggttttcatcatattctacgaccgtgtcctcgtgcctaccttaagaagaataaccggtatagacacggggataacgctactgcagaggattggaaccggaattttcttcgcctttgttagcttgatagtctccggtttcgtcgaggaacggaggagaacgttcgcgctgactaaaccaacacttggtatggctccaaggaagggagaaatctcctcaatgtcagctatgtggctgatcccacaactcgcccttgcgggtatagctgaggcgtttggagctataggacagatggagttttactacaagcagttccctgagaacatgaggagttttgctggttcgatcttctatgtaggagcaggagtttcgagttacctcggtagcttcttgattgcaatggttcacaggacgacgcagaactcagctggtggtaattggttggctgaggatttgaacaaaggaagattggattacttctatttcatgatcgctggaatcttggcagttaattttgcttacttcttggtcatgtcaagatggtatagatacaaaggaagtgatggtgaagtgacaacttatgaaaccaatggagatgccatcaaacaacaagacaagaatactgtctgatgatcatgggtttctcatcttctggaatttataaggcatatatagtttttgttcagcttcaatcatcttacgcccttgaacttgtttgtagtaagccaatgagaagtgcggtagtcatatacttgtcatggctctttattttgtttttttactggttactatgctgtgatcacatctctttcgttctaccattgtggagagaagagagtttataacatcaaatgtattgcaaataaaaagttgtcttgcatttcatgtttctatttctgtcattcctcataatacaacaggaaaaaggaaacattacttagaaagatacttataaaaagcgatatgttagagaaatgtagaatacaatgttgtagagccaaatgaccccggcccatccccacccgaacccttttgtcacaacaaagctccaattcacatagattacaagtagaatagccacctgtttggaagaaaatggtcaag

SEQ ID NO: 120 - protein, 612 aa, Brassica juncea; identical to SEQ ID NO: 26

SEQ ID NO: 121 - DNA, 4477 bp, Brassica juncea
  CDS (1030)..(1186): exon 1
  CDS (1549)..(1766): exon 2
  CDS (1856)..(2409): exon 3
  CDS (2485)..(3391): exon 4
aataaatgatttgagaaaaaaataaaattaaaataagaaccaataaatcggaataaaaaaattagtggattttaaaagaaattttgtctgactttttctcccgcaatccaccaacattaaattttagcagatacaaattttagtagatcataatctcttaccaactaatttgactaaaccaatcatggtggaccgatcaaatagtggaagattcgctattgaatagaaattaagaacagatttgtacgtgtgtttcaggttagctcactacaaattttttttgttctttaccatcattatttcatatatttgcattagctgcaaacgatgttaaaaatttacattgcttaactaaatgattctgaaagtgttgttgtttcatgatttaagttttcatacatacaaaaatatctaagagttgttttcaaccttatttgttagtatttagtttcatttacttcagcattttttcaaggactaacttaatatatataacattatatcatatgaaataaaaaggaaactaaaacagtcaattttcataagatggagcatgttcttgagatatttcttatattaatgatatatttgttaaaattaaatgaagacaaataaaaagcataaaaatagaagaagaggagataaatgaaatacgaaaatggatgatggaaaacaaatagagagcttaaaagaacgtgccgttattaaagagtgagtgattatgatggggccacaacacttgtaatggaatctacattttcacctttttttaagtttaattttgtaaacaaaaatactttaattaactaatttaaaaccaaaattataatcactaacacagttctctttcacggccatattcacaaattaccaatttgtctatattccgacacatccaccatcctctttaccactatatatagagacaactccaagatgaagaaaaaacggagtcatcattattagccttttgagacaacaatacaaaataaagaaaatacaactttaaactgcttcagtagtagcaaaatggagagaaagcctctggaagttgagtccaccgatcatcagaaaccttcctccgccgtctacgacggctctgctacggcggttgattctgttgaagaagaagttcaggaaaccaaactcgtttatagaggctggaaagtcatgcctttcatcataggtaacgcatatgtttttaaacatattaaaaatataaattttgataaaaaatatatcattttctttgattggtatatttccaaagttttagaaactatatttgtagaaatttcctgtaattaaattttgacaattttcttctctgtttctagaaactatattttgttggtttgattttattattggtgagattctttgtgttgttgtcttaagctttgacttagtcaaacagtaatttaacccaaaagagtgagatcttgagtttgaagatgtttcagaacacataaatgatcaagaatctcttgtttgattgctaaggtcaaagtcttatgatcttttcttcttgcatgttgttattaccaggaaacgagacatttgagaagcttgggatcattggaacactatcaaaccttctggtttacttaactgctgtcttcaacatgaagagtatcacagccgcaacaatcatcaacgcctttagtggcacaatcaacttcggaaccttcgttgctgccttcctttgcgacacttacttcggtcgttacaagacactaaccgtcgcggtcatcgcatgttttcttgtaataatccatcctctataaccttttcttcctccacaagcaatcttggtttataaacctaaaaaaaaatctggttcttgttttggtagggatcacttgtgatactattaactgctgcagtaccacaactgcatccagctccatgcggaatagccctcacgtgtacaggcccaagtggcggccagatagcctttctactaatgggtcttgcctttcttgtggtgggagcaggtgggattagaccgtgtaatcttgcttttggagctgatcagtttaaccctaaaagcgagtcagggaagagagggattgatagtttctttaactggtacttcttcaccttcacgttcgcgcagatcttgtcgctgacactagttgtctacatccagtctaacgtcagttggaccatcggtttaaccatacctgtcgtgttaatgttcttggcctgcgtgatcttctttgcgggtgataagttgtatgtcaagatcaaagcctcaggtagtccattggctagtatagctcaagttataacggttgctatcaagaaacgtgggttaaaggctgtgaagcagccttgggttaacctttacaattactacccactaaactacgcaaactctaagctcaagtacaccgaccagttcaggtaaagacacacggttataaataatatctttccacttttgtttacttagaaagcaagctttcttttttttggtaggtttcttgataaggcggcgatcttggctcctgaagacaagttggaggctgatggtaagcctacggatccatggaagctatgtacaatgcaacaagttgaagaagtgaagtgcattgtgagagtgcttcctatatggttcgcttcatcaatctattacttgaccatcacacaacaaatgacctacccagtcttccaagccctccagagcgatcgtcgcttaggctctggagggtttgtgattcctgcagccacctatgtggtcttcttgatgacgggaatgactgttttcatcataatctacgaccgcgtactcgtgcctaccttgagaagaatcaccggtatagacaccgggatcacgctcttgcaaaggataggaaccgggattttcttcgcctttttgagcttggtagtgtctggtttcgtcgaggaacggaggaggactttcgcattgactaaaccaacactcggtatggcgccacggaagggagaaatctcctcaatgtcagctatgtggctgataccgcagctcacactcgcgggtgtagccgaggcatttggagctattggacagatggagttttactacaagcagttccccgagaacatgaggagtttcgccggctccatcttctatgtgggaggaggagtttctagttacctcggcagcttcttgattgcaacggtacacaggacgacgcagaactcggctggcggtaactggttggctgaagatttgaacaaaggaagattggatttgttttacttcatgatcgctggaatcttggcggttaattttgcttacttcttggtgatgtcaagatggtataggtacaaaggaagtgatgatgaagtgacagcttatgaaacaaatggagatgtgatcaaacaacaagacaagaacaaagtctaatgatcatgtggtttctcatcttctggaagcttttagacttagtttttggtcagcttcataccatttacaactctttggactctttgaaataagctaagtaatcatatacttgttatagctctttttcttttttcctgatttgctatattacatcacatctcttttttttctatcactgtggaggagaaggagatcataagttcagatgtattacagaataacaatttgttttgcattttaaggattatgttttctacttctgatcattaccacaacagaacaaacttaaaaaggaaagcaaacacaacaaaacactacttaggaaattgatacttatatgcataacaactttgtatcaaagtttcaaacagagacatcactttcttgaatgacattgagaggctctctctaggcttctatcagactgtgtaggactgttgaatggtttcaatgtcaagacctttaagtctcaccacagattcaacgtgacccttgagtgtgtgaagctccctcaacctatcaaagtgtaaaagacactgagatatataacaatgttcaggttttgagtagagtagatgagtcttttacctagcgatctctgctcttctcttagcttcttcagccatttgagacagctcgttgaaatgggttcgctctgggaacatcttagcatctggcgcttgcaacccatgcagcgtcctctgcgcatgtgcccattgtaactccctttgctctttcccaaagtctttcttcctagtgaatgcaacctgtggaaacattcacagagaccattataatcaaacgtgtagaaaaagctatcatatatggaaagaatctttgatatacataccctttgttcaataacaagatcccaagctctgccactaagtgcatagcgtatcaagaacttgatgatgtcaagaggaatgtagaagacaatgttgtaaagccaaatgactccagcccatccccaccctatcccttcaattgcagcaaagctccaatttgcatagactgcaattagagtagccacctgtttgcaagaaaatggtttcaagaaaacacaacagcagtttataaact

SEQ ID NO: 122 - protein, 612 aa, Brassica juncea; identical to SEQ ID NO: 66

SEQ ID NO: 123 - DNA, 2347 bp, Brassica juncea
  CDS (33)..(189): exon 1
  CDS (367)..(584): exon 2
  CDS (675)..(1228): exon 3
  CDS (1426)..(2332): exon 4
acggttactttagtagtagtaattactacaaaatggagagaaagtctctagaagtcgagtctatggatcaccaaaaactttcctccgccgtgtacgatggctctgttacggccgttgattctgttaaagaagatgttcaggagaccaaagtcgtttatagaggctggaaagtcatgccttacatcattggtaacgcaataatattatcatttaccgtgctctataaactttcttctttttaatgttaaaaaaaactttcttcttttggaaactatttcttttgtcgttttgttgtcttaagttttcacttagtcataatattgaagtcttatgatcttggttaatctttgttgttgttaccaccaggaaatgagacatttgagaagcttgggatcattggaacactatcaaaccttctggtttatttaacttctgtcttcaacatgaagagtgtcacagctgcaacaatcatcactgcctttgctggcacagtcaacttcggaactttcgtcgctgctttcctttgcgacacttacttcggtcgatacaagactcttaccgttgcggtcctcgcctgttttcttgtaaagatccatcccctcataactctttcttcctctacaggcaatattggtttataacctaaaaaaaaaaatctggttcttgttttgtagggatcacttgcgatactattgactgctgcagtcccacaactacatccagtcccatgcggcacagcgagctcgtgtatcgggccaagtggtggccagatagcgtttctactgatgggtcttggaattcttgtcgtgggagcaggagggattagaccgtgcaatctagctttcggagctgatcagtttaacccgaagagcgggtcagggaagagagggattgatagtttcttcaactggtacttcttcaccttcactttcgcccagatcttgtctctgacagtagttgtctatgtccagtctaatgtcagttggaccatcggtttaaccatcccggttgttctaatgttcttggcctccgtgattttctttgcgggtgctaagttgtatgttaagatcgaagcctcaggtagtccattggctagtgcagctcatgttataacggctgctatcaagaaacacaggttaaagtcagtgaaacagccttggctgaacctttacaactactacccatcaaaatacgcaaacgccaagctcaaatacaccgaacaattcaggtaaacacacacttttaaaccggtaaaaaaacaccgttatatatatatatatttttttttttttgagtgaatgaatgttaaaattattcatatcaaaacttttttacaatgactgcatctatagttgatatatatatacttatacaatgtctttttttgatgctttatgtttactgagagagattcttactcggcaggtttctcgacaaggcggcgatcttgactcctgaagacaagttggaggctgatggtaagcctgtgaatccgtggaatctatgtacaatgcaacaagttgaagaagtgaagtgcatcatgagagtgcttcctatatggtttgcttcatcgatctactacttaaccatggcgcaacaaatgacttatcctgtcttccaagctctccagagtgatcgtcgcctaggctccggaggtttcatgatcccggcagccacctatgttgtcttcttgatgactggcatgaccctcttcatcatattttatgaccgtgtcttggttcctacattaaaaagtataaccggtatagagacgggtataacgctcttgcaaagaattggagccgggattttgttcgccttgttaagcttaattgtctctggtttcgtcgaggaacgtaggagaactttagcactaactcaaccgacactcggtttagcgccacggaagggagaaatctcctcaatgtcggctatgtggctgattccgcagcttgtacttgctggtatagccgacgcgtttggagctattggacagatggagttttactacaagcagttccctgagaacatgaggagttttgctggttctatcttttacgtaggagcaggagtttcgagttacatcagtagcttcttgatcacaacggttcacaggatgacgcagaactcggcgggtggtaattggttagctgaggatttgaacaaagggagattggattacttctatttcttgttagctggaatcttggcagttaattttgcttacttcttggtgatggcaagatggtataggtacaaaggaagtgatgatgaagagacaagttatgaaaccagtggagatatcatcaaagaacaagacaagaacaaagtctgatgatcatatttc

SEQ ID NO: 124 - protein, 612 aa, Brassica juncea
MERKSLEVESMDHQKLSSAVYDGSVTAVDSVKEDVQETKVVYRGWKVMPYIIGNETFEKLGIIGTLSNLLVYLTSVFNMKSVTAATIITAFAGTVNFGTFVAAFLCDTYFGRYKTLTVAVLACFLGSLAILLTAAVPQLHPVPCGTASSCIGPSGGQIAFLLMGLGILVVGAGGIRPCNLAFGADQFNPKSGSGKRGIDSFFNWYFFTFTFAQILSLTVVVYVQSNVSWTIGLTIPVVLMFLASVIFFAGAKLYVKIEASGSPLASAAHVITAAIKKHRLKSVKQPWLNLYNYYPSKYANAKLKYTEQFRFLDKAAILTPEDKLEADGKPVNPWNLCTMQQVEEVKCIMRVLPIWFASSIYYLTMAQQMTYPVFQALQSDRRLGSGGFMIPAATYVVFLMTGMTLFIIFYDRVLVPTLKSITGIETGITLLQRIGAGILFALLSLIVSGFVEERRRTLALTQPTLGLAPRKGEISSMSAMWLIPQLVLAGIADAFGAIGQMEFYYKQFPENMRSFAGSIFYVGAGVSSYISSFLITTVHRMTQNSAGGNWLAEDLNKGRLDYFYFLLAGILAVNFAYFLVMARWYRYKGSDDEETSYETSGDIIKEQDKNKV

SEQ ID NO: 125 - DNA, 2549 bp, Brassica juncea
  CDS (3)..(218)
  CDS (317)..(870)
  CDS (966)..(1872)
gaaacgagacgtttgagaagcttgggatcattggaacactatcaaaccttctggtttatctaactgctgtcttcaacatgaagagtatcacagctgcaacaatcatcaatgcattcagcggcacaatcaacttcggaaccttccttgctgctttcctctgcgacacttacttcggtcgatacaagactctaaccgtcgctgtcatcgcctgttttcttgtaatgatcattccttttgcaatctttcttgccccacaagctttcttagtttaacaaccctaaaaatctgataaatgttttttttttctttttggtagggatcactcgtgatactattaacagctgcagtgccacagctacatccaactccgtgcggaacagctatctcatgtatcgggccaagcggtggccagatagcgtttctgctgctgggtctcgggttccttgtagtgggagcaggcgggattagaccgtgtaatctagctttcggagctgatcagtttaatcccaagagcgagtcagggaaaagagggatagatagtttcttcaattggtacttcttcaccttcactttcgcgcagatcttgtcgctgacactgatcgtctatgtccagtctaacgtcagctggaccatcggtttaaccatcccggtcgttctcatgttcttggcctgtgtgattttctttgcgggtgataagttgtatgtaaagatcaaagcctcaggtagtcctttagccagtatagctcaagttatagcggttgcaatcaagaaacgtgggttaaagccaacgaaacagccttggcttaacctctacaattattacccaccaaagtacgcaaactccaagctcaaatacaccgaccagtttaggtaacaaaacacacaaattaccaagaactagttatatctttactatctttccgtttttgttttatggttactgagaaagtttcctgttttggcaggtttcttgataaggcggcgatcttggctcccgaagacaagttggaggctgatggtaagcctgcggatccatggaagctttgtacaatgcaacaagttgaagaagtgaagtgcattgtgagagtgcttcctatatggtttgctgcatccatctattacttaaccatcacgcaacagatgacctatcccgtctttcaagccctccagagcgaccgtcgcttaggctccagaggatttgtgatccccgcagccacctacgttgtcttcttgatgacaggaatgacggttttcatcatattctacgaccgtgtcctcgtgcctaccttaagaagaataacaggtatagacacggggataacgctcttgcagaggattggaaccggtattttcttcgcctttcttagcttgatagtctccggtttcgtcgaggaacgtaggagaacgttcgccctgactaaaccaacactcggtatggctccaaggaagggagaaatctcttcaatgtcagctatgtggctgatcccacaactcgcccttgcgggtatagccgaggcgtttggagctattggacagatggagttttactacaagcaattccctgagaacatgaggagttttgctggttcgatcttttatgtaggagcaggagtttcgagttacctcggtagcttcttgattgcaatggttcacaggacgacgcagaactcggctggtggtaactggttagctgaggatttgaacaaaggaagattggatttgttttacttcatgatcgctggaatcttggcggttaattttgcttatttcttggtcatgtcaagatggtatagatacaaaggaagtgatgatgaagtgaaaacttatgaaaccaatggagatgccatcaaacaacaagacaagaacaatgtctgatgaactgtagtttctcatcttctggaagttctaagacttagtttttggtcagcttcaatcctcgtacactcttggacttgcttgtagtaagccatagagaaatgcagtagtcatatacttgttctggctctttatttttgtttttttttcttctggttactgtgttacgatcacatctctttcgttctatgattgtggagaaaagagagattataacatcaaatgtattgcaaaataaaatgttgtcttgcattttgaggtacatgtttgtcagtcatcatcatacaacatgactaactcaaaaggaaacaaactcaccaaaaacattacttaggcatttgatacttacatgatttgtatcaaactttaaaacggagatattgactttttggaaggaaactgagacggttcttgagctctctccacaattctatgagactgtgtaagattgttgaatggtttgatgtcaagaccttttagtctcaagacagatccaacgtgatccctgagtgtgtgaagctctcaaaaccttacaaagtgcaaaagagaatgagacgaaatagcccaagtgttccagttttgtgttctttagcatgaagaggagagacatatttgacttctgttttttcttttcttttcttttcttttccacatgttatgaaagttgaaactct

SEQ ID NO: 126 - protein, 559 aa, Brassica juncea
NETFEKLGIIGTLSNLLVYLTAVFNMKSITAATIINAFSGTINFGTFLAAFLCDTYFGRYKTLTVAVIACFLGSLVILLTAAVPQLHPTPCGTAISCIGPSGGQIAFLLLGLGFLVVGAGGIRPCNLAFGADQFNPKSESGKRGIDSFFNWYFFTFTFAQILSLTLIVYVQSNVSWTIGLTIPVVLMFLACVIFFAGDKLYVKIKASGSPLASIAQVIAVAIKKRGLKPTKQPWLNLYNYYPPKYANSKLKYTDQFRFLDKAAILAPEDKLEADGKPADPWKLCTMQQVEEVKCIVRVLPIWFAASIYYLTITQQMTYPVFQALQSDRRLGSRGFVIPAATYVVFLMTGMTVFIIFYDRVLVPTLRRITGIDTGITLLQRIGTGIFFAFLSLIVSGFVEERRRTFALTKPTLGMAPRKGEISSMSAMWLIPQLALAGIAEAFGAIGQMEFYYKQFPENMRSFAGSIFYVGAGVSSYLGSFLIAMVHRTTQNSAGGNWLAEDLNKGRLDLFYFMIAGILAVNFAYFLVMSRWYRYKGSDDEVKTYETNGDAIKQQDKNNV

SEQ ID NO: 127 - DNA, 3915 bp, Brassica juncea
  CDS (374)..(530): exon 1
  CDS (987)..(1204): exon 2
  CDS (1298)..(1851): exon 3
  CDS (1941)..(2847): exon 4
ttaaaagaacgtgccgttattaaagagtgggtgttaataatgggggccacagcaattgtaatggaatctacattttcatgaatttcagtttttttttaaagttaatttcggtaagaaaacacttttgttaattaattttaattttagaaccaatattataatcactaacacagctccctttcccggccatattcacaaattaccaatttgtctagattccgacacatccaccatcctctttcttcttaccactatatatagagacaactctaagaggaagaaagcacagagtcatcattagccttttgagacaacaaaaacatatacaaaataaagaaaccacaactttagctactattttagtagttgtaacatggagagaaagcctctagaagttgagtccacggaccaccagaaaccttcctccgccgtgtacgatggctctgctacggcggttgattctgttcaagaagaagttcaggagacgaaagtcgtttacagaggctggaaagtcatgcctttcatcattggtaacaacaaaacatattattcacatttaacatcagtcttgctcaaagagttgttggtttaatttacatttttaaaaatatattaattttttaaaaaaatatattaaatattaataataaatataatattttctattattactaatttttcataatttcagaaactatatttctatagttttagaaattttgataactttcttctatgttttttttttctctgtttcgtgaaacaatattttgttggtttcatgagttgttaatttggttttattattgattagattctctgtgttgttgtcttaagctttgacttagtcaaacggtaatttattgcaaaaagatggagatcttgaatttgaagatgttccagaacataaatgatcaagaataagtgtttggtttctgatgtcaaagtcttatgatcatcttgctcttgcatgttgttattaccaggaaacgagacatttgagaagcttgggatcattggaacactatcaaacctcctggtttacttaaccgctgtcttcaacatgaagagtatcacagctgcaacaatcatcaacgcctttagtggcacaatcaacttcggaaccttcgttgctgctttcctctgcgacacttacttcggtcgttacaagactctaaccgtcgcggtcatcgcatgttttcttgtaatgatccatccatcctctataacacctttcttcctccacaagcaatcttagtttataacctaaaaaaaatatgattcatgtttttggtagggatcacttgtgatactactaactgctgcagtaccacaactacatccagctccatgcggaacagcccttacgtgtacaggaccaagtggtggccagatagcgttcctactgatgggtcttggctttcttgtggtgggagcaggtgggataagaccgtgtaatcttgccttcggtgcggatcagtttaaccccaagagcgagtcagggaagagagggattgatagtttcttcaactggtacttcttcaccttcacgttcgcgcagatcttgtcgctgacactagttgtctacatccagtctaacgtcagttggaccatcggtttaaccatccctgtcgtgttaatgttcttggcctgcgtgatcttctttgcgggtgataagctgtatgtaaagatcaaagcctcaggtagtccattggctagtataggtcaagttataacggttgctatcaagaaacgtgggttaaagcctgtgaagcagccttggcttaacctttacaattactacccactaaactacgcaaactccaagctcaagtacactgaccagttcaggtaaagacacacagaccaaaaactagtttaatgtcttttctacttttgttttatggttacttagagagaaagctttctatttttggcaggtttcttgataaggcagcgatctttgctcctgaagacaagctggaggctgatggaaagccagtggatccatggaagctttgtacaatgcaacaagttgaagaagtgaagtgcattgtgagagtgcttcctatatggtttgcttcctcgatctactacttgaccatcacgcaacagatgacctatcctgtcttccaagccctccagagcgatcgtcgcttaggctctggaggatttgtgattcctgcagccacctatgttgtcttcttgatgacaggcatgactgttttcatcattatctacgaccgtgtcctcgtgcctaccttgagaagaatcaccggtctagacaccgggatcacgctcttgcagaggataggaactgggattttctttgccttcttgagcttggtagtctccggtttcgtcgaggaacggaggagaactttcgccttgacaaaaccaacgctcggtatggcgccacggaagggagaaatctcctcaatgtcagcaatgtggctgataccgcagctcacactcgcgggtgtagccgaggcgtttggagctattggacagatggagttttactacaagcagttccctgagaacatgaggagtttcgctggttccatcttttacgtaggaggaggagtttcgagttacctcggtagcttcttgattgcaacggttcacaggacgacgcagaactcggctggtggtaactggttagctgaagatttgaacaaaggaagattggatttgttttacttcatgatcgctgggatcttggccgttaattttgcttatttcctggtgatgtcaagatggtataggtacaaaggaagtgatgatgatgtgacaacttgtgaaaccaatggtgatgtgatcaaacaacaagacaagaacaaagtctaatgatcatgtggtttctcatcttctggaagcttttagacttagtttctggtcagcttcaatccattcatactctttgaactttcttggaataagctaagtaatcatatactacttgaagctctcttttattatttcctggttactatgttacatcacattcacatctctttctttctatcattgtggaggaaaaggagatcataacttcagatgtaatacagaataacaatttgttttgcatttaagggtaatgtttctacttcatgatcattcctcgtcattcaacagaacaagcttaaaaacgaaagcaaacaagcaaaaccactacttaggaatatatgcataacttgtatctaagtttcaaacagagacaccactttcttgaaggacattgagatggttcctgagctctctctctctctaggcttctatcagactgtgtaagactgttgaatggtttcaatgtcaagacctttaagtctcacgacagattcaacgtgacccttgagtgtgtgaagctccctcaacctatcaaagtgtaaaagagaatgagacaaataacaaatgttccagttaatgtgacttcacaggaaggaaactagtaaagaaagcagatgggtcttttacctagcgatctctgctcttctcttagcttcttcagccatttgggaaagctcgttgaaatgggttcgctctgggaacatcttagcatccggtgcttgcaggccatgcagcgtcctctgtgcatgtgcccattgtaactccctttgctctttcccaaaatccttcttcctagtgaatgcaatctatggaacaacatacacatacaccattacaatcaaagatgtctccacaatacataaatggaaagaatcttgatatacataccctttgttcaataacaagatcccaagctctgccactaagggcataccgaatcaagaacttgatgatgtcaagaggaatgtagaacacaatgttgtaaagccaaatgactccagcccatccccacccaatcccttcaatagcagcaaagctccaatttgcatagactgcaattagagt

SEQ ID NO: 128 - protein, 612 aa, Brassica juncea
MERKPLEVESTDHQKPSSAVYDGSATAVDSVQEEVQETKVVYRGWKVMPFIIGNETFEKLGIIGTLSNLLVYLTAVFNMKSITAATIINAFSGTINFGTFVAAFLCDTYFGRYKTLTVAVIACFLGSLVILLTAAVPQLHPAPCGTALTCTGPSGGQIAFLLMGLGFLVVGAGGIRPCNLAFGADQFNPKSESGKRGIDSFFNWYFFTFTFAQILSLTLVVYIQSNVSWTIGLTIPVVLMFLACVIFFAGDKLYVKIKASGSPLASIGQVITVAIKKRGLKPVKQPWLNLYNYYPLNYANSKLKYTDQFRFLDKAAIFAPEDKLEADGKPVDPWKLCTMQQVEEVKCIVRVLPIWFASSIYYLTITQQMTYPVFQALQSDRRLGSGGFVIPAATYVVFLMTGMTVFIIIYDRVLVPTLRRITGLDTGITLLQRIGTGIFFAFLSLVVSGFVEERRRTFALTKPTLGMAPRKGEISSMSAMWLIPQLTLAGVAEAFGAIGQMEFYYKQFPENMRSFAGSIFYVGGGVSSYLGSFLIATVHRTTQNSAGGNWLAEDLNKGRLDLFYFMIAGILAVNFAYFLVMSRWYRYKGSDDDVTTCETNGDVIKQQDKNKV

SEQ ID NO: 129 - DNA, 3545 bp, Brassica juncea
  CDS (790)..(928): exon 1
  CDS (1181)..(1398): exon 2
  CDS (1482)..(2035): exon 3
  CDS (2227)..(3133): exon 4
attaatttatttatttttgtaattattactatttttaagtatttttatctttttattttaaaacataatataatttgaaaaatctttattatttttgttccttttttaaaagatatcaaatatcaaatagtcaaatactattagttggtgaatctaaaagttcaccatagggagtgaacccaataattactcatttaagaataagaagtagaaatatatcataagaatgtagaaacaaaactgacaaaaagcttaagacaattttttcgcatttttagaagaaaccttttatttatatgaaatttatacatataatgacttattacatttctccatatatacataaaacataagttaatgtacatcttttgaaaacataagctaacatttataggaacgtgctgttattaagagatagttgcttgtgatggggccatagcacttgtaatggaatctagatttccatggattttcgtttttttttctttaaagtttagttttggaagaaaaaagaaaaataaaggtttgattaagtaattgtaaaataaacattataatcactaactaacacatgtctctttcatggccatattcataaattaccgatttgtctagattccgacagctccacccaggactgtctccaccatcttctttattctgaacactataaatagagtcaggtccaagatgaagaacatagtcattagcctttgagacaacaacaacatacaaaaataaataaagtaccaatttaacggttactttagtagtaataattactacaaaatggagagaaagcctctcgaagtcgagtcgacagatcaccaaaaactttcctccgccgtgtacgatggccctgttgaagaagatgtccaggagaccaaagtcgtttatagaggctggaaagtcatgcctttcatcattggtaacacaaaaatacaatcacttgccgtgctctataaactttcttcttgtggaaactattggtttcacgaagttaagaaaaccccgaatagagtaattcttgatcaacaagaaacaataacctagaatcaactatgacaaaatctcatttttaaaaactttcttcttttggaaactatttcttttgtcgtgttgttgtcttaagatcaaagtcttaggttcttggttatttttttgttgttgttaccaccaggaaatgagacatttgagaagcttgggatcattggaacactatcaaaccttctggtttatttaactgctgtcttcaacatgaagagtatcacagctgcaacaatcatcaatgcctttgctggcacagtcaactttggaactttcgttgctgctttcctctgtgacacttacttcggtcgatacaagactcttaccgccgcggtcatcgcctgttttcttgtaaagatccgtcctctctaactctttcttcctccacaagaaatcttggtttataacctttaaatctaattcttgttttgtagggatcacttgcgatactattgactgctgcagtaccacaactccatccagctccatgcggaacagcgagctcgtgtatcgggccaagtggtggccagatagcgtttctactgatgggtcttgggattcttgtagtgggagcaggagggattagaccgtgcaatctagctttcggagctgatcagtttaatcccaagagcgggtcagggaaaagagggattgatagtttcttcaactggtatttcttcaccttcactttcgcgcagatcttgtctctgacagtagttgtctatatccagtctaatgttagttggaccatcggtttaaccatcccggtcgttctaatgttcttggcctccgtgattttctttgcgggtgctaagttgtatgttaagatcgaagcctcaggtagtccattggctagtatagctcatgttataacagctgcaatcaagaaacacgggttaaagtcagtggaacagccttggctgaacctttacaactactacccagcaaaatacgcaaacgccaagctcaaatacaccgaccaattcaggtaaacacacacactttaaaaacctgtgaaaacaccgtttatactttatacatatactttgacgcagtaaaaaaaacttaaaacaaagtaaaaacccgtaaaaacactgtttataaccacacagtaaaaactagtctcgtcatgtgttttgatgttttatgtttactgagagaaagcatcatacttggcaggtttctcgacaaggcggcgatcttggctcctgaagacaagttggaggctgatggtaagcctgtgaatccatggaagctatgcacaatgcaacaagttgaagaagtgaagtgcatcatgagagtgcttcctatatcgtttgcttcgtcgatctattacttaaccatcacgcaacaaatgacttatccggtcttccaagccctccagagtgatcgtcgcttaggctccggaggtttcgtgatcccggcagccacctatgttgtcttcttgatgactggcatgacactcttcatcatactctatgaccgtgtcttggttccaaccttaaaaagaataaccggtatagagacgggtataacgctcttgcaaagaattggaaccgggattttcttcgccttgttaagcttaatagtctctggtttcgtggaggaacataggagaaatttagcactaactaaaccaacactcggtttagcgccacggaagggagaaatctcctcaatgtcggctatgtggctggttccacagcttgtgcttgctggtataggcgacgcatttggagctattggacagatggagttttactacaagcagttccctgagaacatgaggagtttcgctggttcattattttacgtaggagcaggagtttcgagttacatcagtagcttcttgatcacaacggttcacaggacgacgcagaactcggcgggtggtaactggttagctgaggatttgaacaaaggaagattggattacttctatttcttgttagctggaatctcggcagttaattttgcttacttcttggtgatggcaagatggtataggtacaaaggaagtgatgatgaagagataagttatgaaaccaatggagatatcatcaaagaacaagacaagaacaaagtctgatgatcatgtgtttctcttcttctggacttttagtctacactctttggattttctttgaataagccatggagaaacgatgtaatgatatacttgctatggctgctttctttttttattttctggttgatatgttagatcacatctctttctttctatcaacgtggagaaaagagagattataacatcacaagtatttgcaaaataaaaaaattgtcttgtattttaaggattatgtttctgttactgtctttcctcaccattcaacagaacaaactcaaaaaatgaaacaaacccacccaagaatactaatttgatagtttacttgtgcataatttgtatggatgtttcaaaacagagatatattgagacggttcattggttctctctatgcttctagtgtaagatttta

SEQ ID NO: 130 - protein, 606 aa, Brassica juncea
MERKPLEVESTDHQKLSSAVYDGPVEEDVQETKVVYRGWKVMPFIIGNETFEKLGIIGTLSNLLVYLTAVFNMKSITAATIINAFAGTVNFGTFVAAFLCDTYFGRYKTLTAAVIACFLGSLAILLTAAVPQLHPAPCGTASSCIGPSGGQIAFLLMGLGILVVGAGGIRPCNLAFGADQFNPKSGSGKRGIDSFFNWYFFTFTFAQILSLTVVVYIQSNVSWTIGLTIPVVLMFLASVIFFAGAKLYVKIEASGSPLASIAHVITAAIKKHGLKSVEQPWLNLYNYYPAKYANAKLKYTDQFRFLDKAAILAPEDKLEADGKPVNPWKLCTMQQVEEVKCIMRVLPISFASSIYYLTITQQMTYPVFQALQSDRRLGSGGFVIPAATYVVFLMTGMTLFIILYDRVLVPTLKRITGIETGITLLQRIGTGIFFALLSLIVSGFVEEHRRNLALTKPTLGLAPRKGEISSMSAMWLVPQLVLAGIGDAFGAIGQMEFYYKQFPENMRSFAGSLFYVGAGVSSYISSFLITTVHRTTQNSAGGNWLAEDLNKGRLDYFYFLLAGISAVNFAYFLVMARWYRYKGSDDEEISYETNGDIIKEQDKNKV

SEQ ID NO: 131 - DNA, 1839 bp, Brassica juncea
atggagagaaagcctctagaagtcgagtcaacggatcaccaaaagcctccctccgccgtgtacgatggctctgttatggcggttgattctgttgaggaagaagttgaggagaccaaagtcgtttacagaggctggaaagtcatgccctttatcattggaaatgagacgttcgagaagcttgggatcattggaacactatcaaaccttctggtttatttaactgctgtcttcaacatgaagagtatcacagctgcaacaatcatcaatgcattcagtggcacaatcaacttcggaaccttcgttgctgctttcctctgcgacacttacttcggtcgatacaagactctaactgtcgctgtcatcgcctgttttcttggatcacttgtgatactattgacagctgcagtgccacaattacatccagctccatgcggaacagctctctcatgtatcgggccaagtggtggccagatagcgtttctactgctgggtctcgggtttcttgtagttggagcaggcgggattagaccatgtaatctagctttcggggctgatcagtttaaccccaagagcgagtcaggaaaacgaggcatcgatagtttcttcaattggtacttcttcaccttcacgttcgcgcagatcctgtcgctgacactaatcgtctatatccagtccaatgtcagctggacaatcggtttaaccatcccggtcgttctcatgttcttggcctgcgtgattttctttgctggagataagttgtatgtgaagatcaaagcctcaggtagtccattggctggtatagctcaagttatagcggttgcaatcaagaaacgtgggttaaagccaacgaaagagccttggcttaacctttacaactactacccaccaaaatacgcaaactccaaactcaaatacaccgaccagtttaggttccttgataaggcggcgattttggctcccgaagacaagttggaggctgatggtaagcctgcggatccctggaagctttgtacaatgcaacaagttgaagaagtgaagtgcattgtgagagtgcttcctatatggtttgctgcatcgatctattacttgaccatcacgcaacaaatgacttaccccgtcttccaagccctccagagcgaccgtcgcttaggatccagaggatttgtgatcccggcagccacctacgttgtctttttgatgacaggaatgacggttttcatcatattctacgaccgtgtcctcgtgcctaccttaagaagaataaccggtatagacacggggataacgctactgcagaggattggaaccggaattttcttcgcctttgttagcttgatagtctccggtttcgtcgaggaacggaggagaacgttcgcgctgactaaaccaacacttggtatggctccaaggaagggagaaatctcctcaatgtcagctatgtggctgatcccacaactcgcccttgcgggtatagctgaggcgtttggagctataggacagatggagttttactacaagcagttccctgagaacatgaggagttttgctggttcgatcttctatgtaggagcaggagtttcgagttacctcggtagcttcttgattgcaatggttcacaggacgacgcagaactcagctggtggtaattggttggctgaggatttgaacaaaggaagattggattacttctatttcatgatcgctggaatcttggcagttaattttgcttacttcttggtcatgtcaagatggtatagatacaaaggaagtgatggtgaagtgacaacttatgaaaccaatggagatgccatcaaacaacaagacaagaatactgtctga

SEQ ID NO: 132 - DNA, 1839 bp, Brassica juncea
atggagagaaagcctctggaagttgagtccaccgatcatcagaaaccttcctccgccgtctacgacggctctgctacggcggttgattctgttgaagaagaagttcaggaaaccaaactcgtttatagaggctggaaagtcatgcctttcatcataggaaacgagacatttgagaagcttgggatcattggaacactatcaaaccttctggtttacttaactgctgtcttcaacatgaagagtatcacagccgcaacaatcatcaacgcctttagtggcacaatcaacttcggaaccttcgttgctgccttcctttgcgacacttacttcggtcgttacaagacactaaccgtcgcggtcatcgcatgttttcttggatcacttgtgatactattaactgctgcagtaccacaactgcatccagctccatgcggaatagccctcacgtgtacaggcccaagtggcggccagatagcctttctactaatgggtcttgcctttcttgtggtgggagcaggtgggattagaccgtgtaatcttgcttttggagctgatcagtttaaccctaaaagcgagtcagggaagagagggattgatagtttctttaactggtacttcttcaccttcacgttcgcgcagatcttgtcgctgacactagttgtctacatccagtctaacgtcagttggaccatcggtttaaccatacctgtcgtgttaatgttcttggcctgcgtgatcttctttgcgggtgataagttgtatgtcaagatcaaagcctcaggtagtccattggctagtatagctcaagttataacggttgctatcaagaaacgtgggttaaaggctgtgaagcagccttgggttaacctttacaattactacccactaaactacgcaaactctaagctcaagtacaccgaccagttcaggtttcttgataaggcggcgatcttggctcctgaagacaagttggaggctgatggtaagcctacggatccatggaagctatgtacaatgcaacaagttgaagaagtgaagtgcattgtgagagtgcttcctatatggttcgcttcatcaatctattacttgaccatcacacaacaaatgacctacccagtcttccaagccctccagagcgatcgtcgcttaggctctggagggtttgtgattcctgcagccacctatgtggtcttcttgatgacgggaatgactgttttcatcataatctacgaccgcgtactcgtgcctaccttgagaagaatcaccggtatagacaccgggatcacgctcttgcaaaggataggaaccgggattttcttcgcctttttgagcttggtagtgtctggtttcgtcgaggaacggaggaggactttcgcattgactaaaccaacactcggtatggcgccacggaagggagaaatctcctcaatgtcagctatgtggctgataccgcagctcacactcgcgggtgtagccgaggcatttggagctattggacagatggagttttactacaagcagttccccgagaacatgaggagtttcgccggctccatcttctatgtgggaggaggagtttctagttacctcggcagcttcttgattgcaacggtacacaggacgacgcagaactcggctggcggtaactggttggctgaagatttgaacaaaggaagattggatttgttttacttcatgatcgctggaatcttggcggttaattttgcttacttcttggtgatgtcaagatggtataggtacaaaggaagtgatgatgaagtgacagcttatgaaacaaatggagatgtgatcaaacaacaagacaagaacaaagtctaa

SEQ ID NO: 133 - DNA, 1839 bp, Brassica juncea
atggagagaaagtctctagaagtcgagtctatggatcaccaaaaactttcctccgccgtgtacgatggctctgttacggccgttgattctgttaaagaagatgttcaggagaccaaagtcgtttatagaggctggaaagtcatgccttacatcattggaaatgagacatttgagaagcttgggatcattggaacactatcaaaccttctggtttatttaacttctgtcttcaacatgaagagtgtcacagctgcaacaatcatcactgcctttgctggcacagtcaacttcggaactttcgtcgctgctttcctttgcgacacttacttcggtcgatacaagactcttaccgttgcggtcctcgcctgttttcttggatcacttgcgatactattgactgctgcagtcccacaactacatccagtcccatgcggcacagcgagctcgtgtatcgggccaagtggtggccagatagcgtttctactgatgggtcttggaattcttgtcgtgggagcaggagggattagaccgtgcaatctagctttcggagctgatcagtttaacccgaagagcgggtcagggaagagagggattgatagtttcttcaactggtacttcttcaccttcactttcgcccagatcttgtctctgacagtagttgtctatgtccagtctaatgtcagttggaccatcggtttaaccatcccggttgttctaatgttcttggcctccgtgattttctttgcgggtgctaagttgtatgttaagatcgaagcctcaggtagtccattggctagtgcagctcatgttataacggctgctatcaagaaacacaggttaaagtcagtgaaacagccttggctgaacctttacaactactacccatcaaaatacgcaaacgccaagctcaaatacaccgaacaattcaggtttctcgacaaggcggcgatcttgactcctgaagacaagttggaggctgatggtaagcctgtgaatccgtggaatctatgtacaatgcaacaagttgaagaagtgaagtgcatcatgagagtgcttcctatatggtttgcttcatcgatctactacttaaccatggcgcaacaaatgacttatcctgtcttccaagctctccagagtgatcgtcgcctaggctccggaggtttcatgatcccggcagccacctatgttgtcttcttgatgactggcatgaccctcttcatcatattttatgaccgtgtcttggttcctacattaaaaagtataaccggtatagagacgggtataacgctcttgcaaagaattggagccgggattttgttcgccttgttaagcttaattgtctctggtttcgtcgaggaacgtaggagaactttagcactaactcaaccgacactcggtttagcgccacggaagggagaaatctcctcaatgtcggctatgtggctgattccgcagcttgtacttgctggtatagccgacgcgtttggagctattggacagatggagttttactacaagcagttccctgagaacatgaggagttttgctggttctatcttttacgtaggagcaggagtttcgagttacatcagtagcttcttgatcacaacggttcacaggatgacgcagaactcggcgggtggtaattggttagctgaggatttgaacaaagggagattggattacttctatttcttgttagctggaatcttggcagttaattttgcttacttcttggtgatggcaagatggtataggtacaaaggaagtgatgatgaagagacaagttatgaaaccagtggagatatcatcaaagaacaagacaagaacaaagtctga

SEQ ID NO: 134 - DNA, 1682 bp, Brassica juncea
gaaacgagacgtttgagaagcttgggatcattggaacactatcaaaccttctggtttatctaactgctgtcttcaacatgaagagtatcacagctgcaacaatcatcaatgcattcagcggcacaatcaacttcggaaccttccttgctgctttcctctgcgacacttacttcggtcgatacaagactctaaccgtcgctgtcatcgcctgttttcttggatcactcgtgatactattaacagctgcagtgccacagctacatccaactccgtgcggaacagctatctcatgtatcgggccaagcggtggccagatagcgtttctgctgctgggtctcgggttccttgtagtgggagcaggcgggattagaccgtgtaatctagctttcggagctgatcagtttaatcccaagagcgagtcagggaaaagagggatagatagtttcttcaattggtacttcttcaccttcactttcgcgcagatcttgtcgctgacactgatcgtctatgtccagtctaacgtcagctggaccatcggtttaaccatcccggtcgttctcatgttcttggcctgtgtgattttctttgcgggtgataagttgtatgtaaagatcaaagcctcaggtagtcctttagccagtatagctcaagttatagcggttgcaatcaagaaacgtgggttaaagccaacgaaacagccttggcttaacctctacaattattacccaccaaagtacgcaaactccaagctcaaatacaccgaccagtttaggtttcttgataaggcggcgatcttggctcccgaagacaagttggaggctgatggtaagcctgcggatccatggaagctttgtacaatgcaacaagttgaagaagtgaagtgcattgtgagagtgcttcctatatggtttgctgcatccatctattacttaaccatcacgcaacagatgacctatcccgtctttcaagccctccagagcgaccgtcgcttaggctccagaggatttgtgatccccgcagccacctacgttgtcttcttgatgacaggaatgacggttttcatcatattctacgaccgtgtcctcgtgcctaccttaagaagaataacaggtatagacacggggataacgctcttgcagaggattggaaccggtattttcttcgcctttcttagcttgatagtctccggtttcgtcgaggaacgtaggagaacgttcgccctgactaaaccaacactcggtatggctccaaggaagggagaaatctcttcaatgtcagctatgtggctgatcccacaactcgcccttgcgggtatagccgaggcgtttggagctattggacagatggagttttactacaagcaattccctgagaacatgaggagttttgctggttcgatcttttatgtaggagcaggagtttcgagttacctcggtagcttcttgattgcaatggttcacaggacgacgcagaactcggctggtggtaactggttagctgaggatttgaacaaaggaagattggatttgttttacttcatgatcgctggaatcttggcggttaattttgcttatttcttggtcatgtcaagatggtatagatacaaaggaagtgatgatgaagtgaaaacttatgaaaccaatggagatgccatcaaacaacaagacaagaacaatgtctga

SEQ ID NO: 135 - DNA, 1839 bp, Brassica juncea
atggagagaaagcctctagaagttgagtccacggaccaccagaaaccttcctccgccgtgtacgatggctctgctacggcggttgattctgttcaagaagaagttcaggagacgaaagtcgtttacagaggctggaaagtcatgcctttcatcattggaaacgagacatttgagaagcttgggatcattggaacactatcaaacctcctggtttacttaaccgctgtcttcaacatgaagagtatcacagctgcaacaatcatcaacgcctttagtggcacaatcaacttcggaaccttcgttgctgctttcctctgcgacacttacttcggtcgttacaagactctaaccgtcgcggtcatcgcatgttttcttggatcacttgtgatactactaactgctgcagtaccacaactacatccagctccatgcggaacagcccttacgtgtacaggaccaagtggtggccagatagcgttcctactgatgggtcttggctttcttgtggtgggagcaggtgggataagaccgtgtaatcttgccttcggtgcggatcagtttaaccccaagagcgagtcagggaagagagggattgatagtttcttcaactggtacttcttcaccttcacgttcgcgcagatcttgtcgctgacactagttgtctacatccagtctaacgtcagttggaccatcggtttaaccatccctgtcgtgttaatgttcttggcctgcgtgatcttctttgcgggtgataagctgtatgtaaagatcaaagcctcaggtagtccattggctagtataggtcaagttataacggttgctatcaagaaacgtgggttaaagcctgtgaagcagccttggcttaacctttacaattactacccactaaactacgcaaactccaagctcaagtacactgaccagttcaggtttcttgataaggcagcgatctttgctcctgaagacaagctggaggctgatggaaagccagtggatccatggaagctttgtacaatgcaacaagttgaagaagtgaagtgcattgtgagagtgcttcctatatggtttgcttcctcgatctactacttgaccatcacgcaacagatgacctatcctgtcttccaagccctccagagcgatcgtcgcttaggctctggaggatttgtgattcctgcagccacctatgttgtcttcttgatgacaggcatgactgttttcatcattatctacgaccgtgtcctcgtgcctaccttgagaagaatcaccggtctagacaccgggatcacgctcttgcagaggataggaactgggattttctttgccttcttgagcttggtagtctccggtttcgtcgaggaacggaggagaactttcgccttgacaaaaccaacgctcggtatggcgccacggaagggagaaatctcctcaatgtcagcaatgtggctgataccgcagctcacactcgcgggtgtagccgaggcgtttggagctattggacagatggagttttactacaagcagttccctgagaacatgaggagtttcgctggttccatcttttacgtaggaggaggagtttcgagttacctcggtagcttcttgattgcaacggttcacaggacgacgcagaactcggctggtggtaactggttagctgaagatttgaacaaaggaagattggatttgttttacttcatgatcgctgggatcttggccgttaattttgcttatttcctggtgatgtcaagatggtataggtacaaaggaagtgatgatgatgtgacaacttgtgaaaccaatggtgatgtgatcaaacaacaagacaagaacaaagtctaa

SEQ ID NO: 136 - DNA, 1821 bp, Brassica juncea
atggagagaaagcctctcgaagtcgagtcgacagatcaccaaaaactttcctccgccgtgtacgatggccctgttgaagaagatgtccaggagaccaaagtcgtttatagaggctggaaagtcatgcctttcatcattggaaatgagacatttgagaagcttgggatcattggaacactatcaaaccttctggtttatttaactgctgtcttcaacatgaagagtatcacagctgcaacaatcatcaatgcctttgctggcacagtcaactttggaactttcgttgctgctttcctctgtgacacttacttcggtcgatacaagactcttaccgccgcggtcatcgcctgttttcttggatcacttgcgatactattgactgctgcagtaccacaactccatccagctccatgcggaacagcgagctcgtgtatcgggccaagtggtggccagatagcgtttctactgatgggtcttgggattcttgtagtgggagcaggagggattagaccgtgcaatctagctttcggagctgatcagtttaatcccaagagcgggtcagggaaaagagggattgatagtttcttcaactggtatttcttcaccttcactttcgcgcagatcttgtctctgacagtagttgtctatatccagtctaatgttagttggaccatcggtttaaccatcccggtcgttctaatgttcttggcctccgtgattttctttgcgggtgctaagttgtatgttaagatcgaagcctcaggtagtccattggctagtatagctcatgttataacagctgcaatcaagaaacacgggttaaagtcagtggaacagccttggctgaacctttacaactactacccagcaaaatacgcaaacgccaagctcaaatacaccgaccaattcaggtttctcgacaaggcggcgatcttggctcctgaagacaagttggaggctgatggtaagcctgtgaatccatggaagctatgcacaatgcaacaagttgaagaagtgaagtgcatcatgagagtgcttcctatatcgtttgcttcgtcgatctattacttaaccatcacgcaacaaatgacttatccggtcttccaagccctccagagtgatcgtcgcttaggctccggaggtttcgtgatcccggcagccacctatgttgtcttcttgatgactggcatgacactcttcatcatactctatgaccgtgtcttggttccaaccttaaaaagaataaccggtatagagacgggtataacgctcttgcaaagaattggaaccgggattttcttcgccttgttaagcttaatagtctctggtttcgtggaggaacataggagaaatttagcactaactaaaccaacactcggtttagcgccacggaagggagaaatctcctcaatgtcggctatgtggctggttccacagcttgtgcttgctggtataggcgacgcatttggagctattggacagatggagttttactacaagcagttccctgagaacatgaggagtttcgctggttcattattttacgtaggagcaggagtttcgagttacatcagtagcttcttgatcacaacggttcacaggacgacgcagaactcggcgggtggtaactggttagctgaggatttgaacaaaggaagattggattacttctatttcttgttagctggaatctcggcagttaattttgcttacttcttggtgatggcaagatggtataggtacaaaggaagtgatgatgaagagataagttatgaaaccaatggagatatcatcaaagaacaagacaagaacaaagtctga

SEQ ID NO: 137 - DNA, 2710 bp, Brassica napus
  exon (1)..(151): exon 1
  Intron (152)..(619): intron 1
  exon (620)..(837): exon 2
  Intron (838)..(1163): intron 2
  exon (1164)..(1717): exon 3
  Intron (1718)..(1797): intron 3
  exon (1798)..(2710): exon 4
atggagagaaagccctttgatgttgagacaactgaggatcacaaagcctactcctccgtcgatggcggtggttctgattcggtcgattcatttgaagacgagcagaaaaagctcgtttatagaggctggaaagtcatgccctttatcattggtaacgctttcttcttctcttcagacaactttttttttttagtttattctgttttgttttgttgtgtcccttttgtcggattatagaacgttttgcccgtgatgtttttattttaatttcgtttcttttgtcttcttagtcttgactgttgaaaatcttgatttggagttcttgtcttgacgtttcgagatgaatgaaacacagatcaaacaaatcaaccaaaccagttgagtttcctagataaatctaccatggaaagtgagagactttgaatcatgcaagttttcagtttcagatataagattttagttagtttctgggagttataacaaagaatgaataataaagtgtccagtccaacactgaaagtccaatctttgatttcaacattgtgaattaaatgtaaaaaggttgttactttatggtttgactaattatttatgttggaaaaaatatattgtgtcacaggtaatgagacatttgagaagatagggatcattgggacactatcaaaccttctggtgtacctaacttcagtattcaaccttaagagtgttacagctgcaaccatcatcaacgccttcagtggcactatcaatttcggcactttcctcgctgctttcctctgcgacacttactttggtcgctacaagactctctctgttgctgtcatcgcctgttttctggtactctaatcaaatgaccatcttgttttattttggccaagattttgtctttttttcttactaaaccatactccctccgtttcattttaagtgtctttttagagatttttttcgttacaaaataagtgtcgttttcgattttcaatgcaaaatttattgattttatgcaaaatttatttttctattagttgaaatatggttaggtgtataggtaatagtgtttttttatacgaaatgtacaaaattaagtgtttccttaatccatgtgccgaaacctaaaacgacacttataatgaaacagagggagtatttcatatttgttgtagggatcgcttgtgatactactgacggctgcagttccaggattgcaccctattccttgtggaacacaaagttcttgccaaggcccaagcgagggccagattgcgtttctgctgatgggtttagcgcttcttgtggtgggtgctggtggaatcaggccgtgtaacttggcctttggtgctgaccagttcaaccccaagtcagaatctggaaagaaaggaatcaatagtttcttcaactggtacttcttcactttcacgttcgcgcagatcatctccctcacactagttgtgtatatccagtcaaatgtgagctggaccatcggtttgagtatccctgtgggtcttatgttcttggcctgcgtcattttctttgctggtcacaaactgtatgtgaaagtgaaagcctctggtagtccattggctggtataggtcatgttatagccgcagctatcaagaaacgtggcttgaagccagttaagcagccttggatcgatctttacaaccacattcctcctaactatgcaaactctactcttaaatacaccgaccagcttaggtaaagtcggaatagttctgtctctgtctttctttgttcatttgctttatgctttgtctgaacaaatgttgtattgccaggtttctagacaaagcagcgattatgacccctgaggacaagttgaactcggatggaacggcttcggatccatggaaactatgtacgatgcagaaagtggaagaagtgaaatgcattttaagagtgattccaatctggttcgcatgcgccatttactaccttgcaataagtatgcaaatgacttatccagtcttccaagctctccagagcgacaggctattaggttcaggtggcttcaagattccagccgccacctatgtcgtgttcttgatgtctggtatgacggttttcatcataatctacgaccgtgtccttgtcccctcgctcaaaagagtgaccggtctagacacggggataacactcttacaaagaataggagctggcattttctttgccgtgttgagtttattggtctccgggtttatagaagaacgtagaagaacctttgcgctgacacgacctacgctcgggtcggagcctcgaacaggagagatctcctcaatgtcagcgatgtggctgattccgcagctggtgcttgcaggggtagcagaagcttttgtagccattgggcaaatggagttttactacaagcagtttcctgaaaacatgaagagctttgcgggttctatcttctatgtcggtggaggagtttctagctacctcgctagcttcttgatctcgactgttcatagaacaactgagcattcacctacggggaattggttagctgaggatctgaacaaagcgaagctggactacttctatttcatgctcacaggactcatgtttgtcaactttctttacttcttgttaatggctagatggtatagatacaaaggcactcatgatgaagtcagttatgtggttgacactgttgacgaagagacgaagcaacaagacaagaactctgtctga

SEQ ID NO: 138 - DNA, 1238 bp, Artificial Sequence
  dsRNA construct for downregulation of GTR1 expression in Brassica napus
  misc_feature (1)..(215): Fragment of BnGTR1_A2 (bp 384 to 598 from start codon in sense orientation
  misc_feature (248)..(991): intron 2 from the Pdk gene of Flaveria
  misc_feature (1024)..(1238): Fragment of BnGTR1_A2 (bp 384 to 598 from start codon in antisense orientation)
gcttgcgatactactcacggcagcagttccgggactgcacccgactccttgtggaacaaagagttcatgcgaagggccaggtgcggggcagattttgtttctgatgttgggtttagcgcttcttgtggttggtgctggtggtatcaggccgtgtaacttggcgtttggtgccgatcagttcaaccccaagtccgaatcaggaaagaaaggaatcaggtaccccagcttggtaaggaaataattattttcttttttccttttagtataaaatagttaagtgatgttaattagtatgattataataatatagttgttataattgtgaaaaaataatttataaatatattgtttacataaacaacatagtaatgtaaaaaaatatgacaagtgatgtgtaagacgaagaagataaaagttgagagtaagtatattatttttaatgaatttgatcgaacatgtaagatgatatactagcattaatatttgttttaatcataatagtaattctagctggtttgatgaattaaatatcaatgataaaatactatagtaaaaataagaataaataaattaaaataatatttttttatgattaatagtttattatataattaaatatctataccattactaaatattttagtttaaaagttaataaatattttgttagaaattccaatctgcttgtaatttatcaataaacaaaatattaaataacaagctaaagtaacaaataatatcaaactaatagaaacagtaatctaatgtaacaaaacataatctaatgctaatataacaaagcgcaagatctatcaattttatatagtattatttttcaatcaacattcttattaatttctaaataatacttgtagttttattaacttctaaatggattgactattaattaaatgaattagtcgaacatgaataaacaaggtaacatgatagatcatgtcattgtgttatcattgatcttacatttggattgattacagttgggaagctgggttcgaaatcgattgattcctttctttcctgattcggacttggggttgaactgatcggcaccaaacgccaagttacacggcctgataccaccagcaccaaccacaagaagcgctaaacccaacatcagaaacaaaatctgccccgcacctggcccttcgcatgaactctttgttccacaaggagtcgggtgcagtcccggaactgctgccgtgagtagtatcgcaagc

SEQ ID NO: 139 - DNA, 1146 bp, Artificial Sequence
  dsRNA for downregulation of GTR2 expression in Brassica napus
  misc_feature (1)..(169): Fragment of BnGTR2_A1 (bp 993 to 1101 from start codon in sense orientation)
  misc_feature (202)..(945): intron-2 from the Pdk gene of Flaveria
  misc_feature (978)..(1146): Fragment of BnGTR2_A1 (bp 993 to 1101 from start codon in antisense orientation)
ccttgataaggcggcgattttggctcccgaagacaagttggaggctgatggtaagcctgcggatccctggaagctttgtacaatgcaacaagttgaagaagtgaagtgcattgtgagagtgcttcctatatggtttgctgcatcgatctattacttgaccatcacgcaaggtaccccagcttggtaaggaaataattattttcttttttccttttagtataaaatagttaagtgatgttaattagtatgattataataatatagttgttataattgtgaaaaaataatttataaatatattgtttacataaacaacatagtaatgtaaaaaaatatgacaagtgatgtgtaagacgaagaagataaaagttgagagtaagtatattatttttaatgaatttgatcgaacatgtaagatgatatactagcattaatatttgttttaatcataatagtaattctagctggtttgatgaattaaatatcaatgataaaatactatagtaaaaataagaataaataaattaaaataatatttttttatgattaatagtttattatataattaaatatctataccattactaaatattttagtttaaaagttaataaatattttgttagaaattccaatctgcttgtaatttatcaataaacaaaatattaaataacaagctaaagtaacaaataatatcaaactaatagaaacagtaatctaatgtaacaaaacataatctaatgctaatataacaaagcgcaagatctatcaattttatatagtattatttttcaatcaacattcttattaatttctaaataatacttgtagttttattaacttctaaatggattgactattaattaaatgaattagtcgaacatgaataaacaaggtaacatgatagatcatgtcattgtgttatcattgatcttacatttggattgattacagttgggaagctgggttcgaaatcgatttgcgtgatggtcaagtaatagatcgatgcagcaaaccatataggaagcactctcacaatgcacttcacttcttcaacttgttgcattgtacaaagcttccagggatccgcaggcttaccatcagcctccaacttgtcttcgggagccaaaatcgccgccttatcaagg

SEQ ID NO: 140 - DNA, 1576 bp, Artificial Sequence
  dsRNA for downregulation of GTR1 and GTR2 expression in Brassica napus
  misc_feature (1)..(215): Fragment of gtr1Bn_A2 (bp 384 to 598 from start codon
  misc_feature (216)..(384): Fragment of gtr2Bn_A1 (bp 933 to 1101 from start codon in sense orientation)
  misc_feature (417)..(1160): intron-2 from the Pdk gene of Flaveria
  misc_feature (1193)..(1361): Fragment of gtr2Bn_A1 (bp 933 to 1101 from start codon in antisense orientation
  misc_feature (1362)..(1576): Fragment of gtr1Bn_A2 (bp 384 to 598 from start codon in antisense orientation)
gcttgcgatactactcacggcagcagttccgggactgcacccgactccttgtggaacaaagagttcatgcgaagggccaggtgcggggcagattttgtttctgatgttgggtttagcgcttcttgtggttggtgctggtggtatcaggccgtgtaacttggcgtttggtgccgatcagttcaaccccaagtccgaatcaggaaagaaaggaatcaccttgataaggcggcgattttggctcccgaagacaagttggaggctgatggtaagcctgcggatccctggaagctttgtacaatgcaacaagttgaagaagtgaagtgcattgtgagagtgcttcctatatggtttgctgcatcgatctattacttgaccatcacgcaaggtaccccagcttggtaaggaaataattattttcttttttccttttagtataaaatagttaagtgatgttaattagtatgattataataatatagttgttataattgtgaaaaaataatttataaatatattgtttacataaacaacatagtaatgtaaaaaaatatgacaagtgatgtgtaagacgaagaagataaaagttgagagtaagtatattatttttaatgaatttgatcgaacatgtaagatgatatactagcattaatatttgttttaatcataatagtaattctagctggtttgatgaattaaatatcaatgataaaatactatagtaaaaataagaataaataaattaaaataatatttttttatgattaatagtttattatataattaaatatctataccattactaaatattttagtttaaaagttaataaatattttgttagaaattccaatctgcttgtaatttatcaataaacaaaatattaaataacaagctaaagtaacaaataatatcaaactaatagaaacagtaatctaatgtaacaaaacataatctaatgctaatataacaaagcgcaagatctatcaattttatatagtattatttttcaatcaacattcttattaatttctaaataatacttgtagttttattaacttctaaatggattgactattaattaaatgaattagtcgaacatgaataaacaaggtaacatgatagatcatgtcattgtgttatcattgatcttacatttggattgattacagttgggaagctgggttcgaaatcgatttgcgtgatggtcaagtaatagatcgatgcagcaaaccatataggaagcactctcacaatgcacttcacttcttcaacttgttgcattgtacaaagcttccagggatccgcaggcttaccatcagcctccaacttgtcttcgggagccaaaatcgccgccttatcaaggtgattcctttctttcctgattcggacttggggttgaactgatcggcaccaaacgccaagttacacggcctgataccaccagcaccaaccacaagaagcgctaaacccaacatcagaaacaaaatctgccccgcacctggcccttcgcatgaactctttgttccacaaggagtcgggtgcagtcccggaactgctgccgtgagtagtatcgcaagc

SEQ ID NO: 141 - DNA, 1911 bp, Arabidopsis thaliana
  CDS (1)..(1908)
atgaagagcagagtcattcttaaccatagagacagaagagataagaatcataacaacaacaacaccaatcattacacacaggttgatactatggagagaaagcctcttgaggttgagccatctactacgacgactaacaccgatgtggtcgattctttcgaggaagagcagagaaaaatcgtttatagaggatggaaagtcatgccttttatcattggtaatgagacatttgagaagcttgggatcatagggacattatcaaaccttcttgtgtacctaacttctgtattcaaccttaagagctacacagctgcaactatcatcaatgcctttagtggtacaatcaatttcgggacttttattgctgcctttctttgcgacacttactttggtcgctacaagactctcagtgtcgctgtcatcgcttgttttctgggatcgtttgtgatactacttactgctgcaattccgtcgttgcaccccgttgcttgcggaaacaaaatctcgtgcgaagggccaagtgtgggacagatactgtttctgctcatgggtttaggctttcttgtggtaggcgctggtggtatcagaccgtgtaatttagcgtttggtgctgatcagttcaaccccaaatccgaatcaggaaagaaagggatcaacagtttcttcaactggtatttcttcactttcacgttcgcgcagatcatctcgctcacagcagttgtgtatatccagtcaaatgtgagttggacaatcggtttgatcattccggtggctcttatgttcttggcgtgtgtgattttctttgctggcgatagattgtatgtaaaagtgaaagcctcgggtagtccattggctggtattgctcgtgttatagcagccgcgatcaagaaacgaggtttgaagccggttaagcagccttgggtcaatctttacaaccatatcccgtctaactatgcaaatactactctaaaatacaccgaccagttcagatttctagacaaagcagcaattatgacccccgaggagaagttgaactccgatggaacggcttccgatccatggaaactatgcacgttgcagcaagtggaagaagtgaaatgcattgtaagagtgattccaatctggtttgcatccacgatatactaccttgcaataactatacaaatgacttatccggtcttccaagcgctccagagcgaccgacgattaggttctggtggcttcaggattcctgcggccacctatgtagtgttcttgatgactggcatgacagttttcatcatattctacgaccgtgtacttgtcccgtcgctcagaagagtgaccgggttagaaaccggtatatcactcttacaaagaatcggagctgggtttacatttgcgataatgagtttattagtttccgggtttatagaggaaaggagaagaaactttgcattgaccaaaccgacactcgggatggcgcctcggacaggagaaatctcatcaatgtcagcgttgtggctgattccgcagcttacacttgcaggcatagcagaagcttttgctgccattggacaaatggagttttactacaagcagtttcctgaaaacatgaagagcttcgcgggttctatcttttatgtcggtgcaggggtttcgagctacctcgctagcttcttgatatcaactgttcatcgaacaaccgcgcattcaccttcagggaattggttagctgaggatctgaacaaagcgaaattggattacttctacttcatgctcacaggactcatggttgttaacatggcttacttcttgttgatggctagatggtatagatacaaaggaggtaatgatgaagacatcactgagattgagaccaatgaagaagaaaccaagcaacagcagctacaagacaagaactctgtctga

SEQ ID NO: 142 - protein, 636 aa, Arabidopsis thaliana
MKSRVILNHRDRRDKNHNNNNTNHYTQVDTMERKPLEVEPSTTTTNTDVVDSFEEEQRKIVYRGWKVMPFIIGNETFEKLGIIGTLSNLLVYLTSVFNLKSYTAATIINAFSGTINFGTFIAAFLCDTYFGRYKTLSVAVIACFLGSFVILLTAAIPSLHPVACGNKISCEGPSVGQILFLLMGLGFLVVGAGGIRPCNLAFGADQFNPKSESGKKGINSFFNWYFFTFTFAQIISLTAVVYIQSNVSWTIGLIIPVALMFLACVIFFAGDRLYVKVKASGSPLAGIARVIAAAIKKRGLKPVKQPWVNLYNHIPSNYANTTLKYTDQFRFLDKAAIMTPEEKLNSDGTASDPWKLCTLQQVEEVKCIVRVIPIWFASTIYYLAITIQMTYPVFQALQSDRRLGSGGFRIPAATYVVFLMTGMTVFIIFYDRVLVPSLRRVTGLETGISLLQRIGAGFTFAIMSLLVSGFIEERRRNFALTKPTLGMAPRTGEISSMSALWLIPQLTLAGIAEAFAAIGQMEFYYKQFPENMKSFAGSIFYVGAGVSSYLASFLISTVHRTTAHSPSGNWLAEDLNKAKLDYFYFMLTGLMVVNMAYFLLMARWYRYKGGNDEDITEIETNEEETKQQQLQDKNSV

SEQ ID NO: 143 - DNA, 1905 bp, Brassica napus
  CDS (1)..(1905)
atgaagagcagagtcatccacagccatagagagagaagagataagcataattacacacagattgaaacaatggagagaaagccctttgatgttgagacaactgaggatcacaaactctacccctccgtcgatggcggtggttctgattcggtcgattcatttgaagacgagcagaaaaagctcgtttatagaggctggaaagtcatgccctttatcattggtaatgagacatttgagaagatagggatcattgggacactatcaaaccttctggtgtacctaacttcagtattcaaccttaagagtgttacagctgcaaccatcatcaacgccttcagtggcactatcaacttcggcactttccttgctgctttcctctgcgacacttactttggtcgctacaagactctctctgttgctgtcatcgcctgttttctgggatcgcttgtgatactactgacggctgcagttccaggattgcaccccattccttgtggaacacagagttcttgccaaggcccaagcgagggccagattgcgtttcttctgatgggtttagcgcttcttgtggtgggtgctggtggaattaggccgtgtaacttggcctttggtgctgaccagttcaaccccaagtcagaatctggaaagaaaggaatcaacagtttcttcaactggtacttcttcactttcactttcgcgcagatcatctctctcacgctagttgtgtatatccagtcaaatgtgagctggaccatcggtttgagtatccctgtgggtcttatgttcttggcctgcgtcatcttctttgctggtcataaactgtatgtgaaagtgaaagcctctggtagtccattggctggtataggtcatgttatagccgcagcgatcaagaaacgtggcttgaagccagttaagcagccttggatcgatctttacaaccacattcctcataactatgcaaactctactcttaagtacaccgaccagctaaggtttctagacaaagcagcgattatgaccgctgaggacaagttgaactcggatggaacggcttcggatccatggaaactatgtacgatgcagaaagtggaagaagtgaaatgcattttaagagtgattccaatctggttcgcatgcgccatttactaccttgcaataagtatgcaaatgacttatccagtcttccaagcgcttcagagcgacaggcgattaggttcaggtggcttcaagattccagccgccacctatgtcgtgttcttgatgtctggtatgacggttttcatcataatctacgaccgtgtcctcgtcccctcgctcaaaagagtgaccggtctagacacggggataacactcttacaaagaataggagctggcattttctttgcggtgttgagtttattggtctccgggttcatagaggaacgtagaagaacctttgcgctgacacgacctacgctggggtcggagcctcgaacaggagagatctcctcaatgtcagggatgtggctgattccgcagctggtgcttgcaggggtagcagaagcttttgcagccattgggcaaatggagttttactacaagcagtttcctgaaaacatgaagagctttgcgggttctatcttctatgtcggtggaggagtttctagctacctcgctagcttcttgatctcgactgttcatagaacaactgagcattcacctacggggaattggttagctgaggatctgaacaaagcgaagctggactacttctatttcatgctcacaggactcatgtttgttaactttctttacttcttgttaatggctagatggtatagatacaaaggcactcatgatgaagtcagttatgtggttgacactgttgacgaagagacaaagcaacaagacaagaactctgtctga

SEQ ID NO: 144 - protein, 634 aa, Brassica napus
MKSRVIHSHRERRDKHNYTQIETMERKPFDVETTEDHKLYPSVDGGGSDSVDSFEDEQKKLVYRGWKVMPFIIGNETFEKIGIIGTLSNLLVYLTSVFNLKSVTAATIINAFSGTINFGTFLAAFLCDTYFGRYKTLSVAVIACFLGSLVILLTAAVPGLHPIPCGTQSSCQGPSEGQIAFLLMGLALLVVGAGGIRPCNLAFGADQFNPKSESGKKGINSFFNWYFFTFTFAQIISLTLVVYIQSNVSWTIGLSIPVGLMFLACVIFFAGHKLYVKVKASGSPLAGIGHVIAAAIKKRGLKPVKQPWIDLYNHIPHNYANSTLKYTDQLRFLDKAAIMTAEDKLNSDGTASDPWKLCTMQKVEEVKCILRVIPIWFACAIYYLAISMQMTYPVFQALQSDRRLGSGGFKIPAATYVVFLMSGMTVFIIIYDRVLVPSLKRVTGLDTGITLLQRIGAGIFFAVLSLLVSGFIEERRRTFALTRPTLGSEPRTGEISSMSGMWLIPQLVLAGVAEAFAAIGQMEFYYKQFPENMKSFAGSIFYVGGGVSSYLASFLISTVHRTTEHSPTGNWLAEDLNKAKLDYFYFMLTGLMFVNFLYFLLMARWYRYKGTHDEVSYVVDTVDEETKQQDKNSV

SEQ ID NO: 145 - DNA, 1905 bp, Brassica napus
  CDS (1)..(1905)
atgaagagcagagtcatcctcagccatagagagagaagagataagcataattatacacagattgaaacaatggagagaaagccctttgatgttgagacaactgaggatcacaaagcctactcctccgtcgatggcggtggttctgattcggtcgattcatttgaagacgagcagaaaaagctcgtttatagaggctggaaagtcatgccctttatcattggtaatgagacatttgagaagatagggatcattgggacactatcaaaccttctggtgtacctaacttcagtattcaaccttaagagtgttacagctgcaaccatcatcaacgccttcagtggcactatcaatttcggcactttcctcgctgctttcctctgcgacacttactttggtcgctacaagactctctctgttgctgtcatcgcctgttttctgggatcgcttgtgatactactgacggctgcagttccaggattgcaccctattccttgtggaacacaaagttcttgccaaggcccaagcgagggccagattgcgtttctgctgatgggtttagcgcttcttgtggtgggtgctggtggaatcaggccgtgtaacttggcctttggtgctgaccagttcaaccccaagtcagaatctggaaagaaaggaatcaatagtttcttcaactggtacttcttcactttcacgttcgcgcagatcatctccctcacactagttgtgtatatccagtcaaatgtgagctggaccatcggtttgagtatccctgtgggtcttatgttcttggcctgcgtcattttctttgctggtcacaaactgtatgtgaaagtgaaagcctctggtagtccattggctggtataggtcatgttatagccgcagctatcaagaaacgtggcttgaagccagttaagcagccttggatcgatctttacaaccacattcctcctaactatgcaaactctactcttaaatacaccgaccagcttaggtttctagacaaagcagcgattatgacccctgaggacaagttgaactcggatggaacggcttcggatccatggaaactatgtacgatgcagaaagtggaagaagtgaaatgcattttaagagtgattccaatctggttcgcatgcgccatttactaccttgcaataagtatgcaaatgacttatccagtcttccaagctctccagagcgacaggctattaggttcaggtggcttcaagattccagccgccacctatgtcgtgttcttgatgtctggtatgacggttttcatcataatctacgaccgtgtccttgtcccctcgctcaaaagagtgaccggtctagacacggggataacactcttacaaagaataggagctggcattttctttgccgtgttgagtttattggtctccgggtttatagaagaacgtagaagaacctttgcgctgacacgacctacgctcgggtcggagcctcgaacaggagagatctcctcaatgtcagcgatgtggctgattccgcagctggtgcttgcaggggtagcagaagcttttgtagccattgggcaaatggagttttactacaagcagtttcctgaaaacatgaagagctttgcgggttctatcttctatgtcggtggaggagtttctagctacctcgctagcttcttgatctcgactgttcatagaacaactgagcattcacctacggggaattggttagctgaggatctgaacaaagcgaagctggactacttctatttcatgctcacaggactcatgtttgtcaactttctttacttcttgttaatggctagatggtatagatacaaaggcactcatgatgaagtcagttatgtggttgacactgttgacgaagagacgaagcaacaagacaagaactctgtctga

SEQ ID NO: 146 - protein, 634 aa, Brassica napus
MKSRVILSHRERRDKHNYTQIETMERKPFDVETTEDHKAYSSVDGGGSDSVDSFEDEQKKLVYRGWKVMPFIIGNETFEKIGIIGTLSNLLVYLTSVFNLKSVTAATIINAFSGTINFGTFLAAFLCDTYFGRYKTLSVAVIACFLGSLVILLTAAVPGLHPIPCGTQSSCQGPSEGQIAFLLMGLALLVVGAGGIRPCNLAFGADQFNPKSESGKKGINSFFNWYFFTFTFAQIISLTLVVYIQSNVSWTIGLSIPVGLMFLACVIFFAGHKLYVKVKASGSPLAGIGHVIAAAIKKRGLKPVKQPWIDLYNHIPPNYANSTLKYTDQLRFLDKAAIMTPEDKLNSDGTASDPWKLCTMQKVEEVKCILRVIPIWFACAIYYLAISMQMTYPVFQALQSDRLLGSGGFKIPAATYVVFLMSGMTVFIIIYDRVLVPSLKRVTGLDTGITLLQRIGAGIFFAVLSLLVSGFIEERRRTFALTRPTLGSEPRTGEISSMSAMWLIPQLVLAGVAEAFVAIGQMEFYYKQFPENMKSFAGSIFYVGGGVSSYLASFLISTVHRTTEHSPTGNWLAEDLNKAKLDYFYFMLTGLMFVNFLYFLLMARWYRYKGTHDEVSYVVDTVDEETKQQDKNSV

SEQ ID NO: 147 - DNA, 1905 bp, Brassica rapa
  CDS (1)..(1905)
atgaagagcagagtcatccacagccatagagagagaagagataagcataattacacacagattggaacaatggagagaaagccctttgatgttgagacaactgaggatcacaaaccctactcctccgtcgatgacggtggttctgattcggtcgattcatttgaaaacgagcagaaaaagctcgtttatagaggctggaaagtcatgccctttatcattggtaatgagacatttgagaagatagggatcattgggacactatcaaaccttctggtgtacctaacttcagtattcaacctcaagagtgttacagctgcaaccatcatcaacgccttcagtggcactatcaacttcggcactttcctcgctgctttcctctgcgacacttactttggtcgctacaagactctctctgttgctgtcatcgcctgttttctgggatcgcttgtgatactactgacggctgcagttccaggattgcaccccattccttgtggaacacaaagttcttgccaaggcccaagcgagggccagattgcgtttcttctgatgggtttagcgcttcttgtggtgggtgctggtggaatcaggccgtgtaacttggcctttggtgctgaccagttcaaccccaagtcagaatctggaaagaaaggaatcaacagtttcttcaactggtacttcttcactttcacgttcgcgcagatcatctccctcacgctagttgtgtacatccagtcaaatgtgagctggaccatcggtttgagtatccctgtgggtcttatgttcttggcctgtgtcattttctttgctggtcataaactgtatgtgaaagtgaaagcctctggtagtccattggctggtataggtcatgttatagccgcagcgatcaagaaacgtggcttgaagccagttaagcagccttggatcgatctttacaaccacattcctcataactatgcaaactctactcttaaatacaccgaccagcttaggtttctagacaaagcagcgattatgacccctgaggacaagttgaactcggatggaacggcttcggatccatggaaactatgtacgatgcagaaagtggaagaagtgaaatgcattttaagagtgattccaatctggttcgcatgcgccatttactaccttgcaataagtatgcaaatgacttatccagtcttccaagcgctccagagcgacaggagattaggttcaggtggcttcaagattccagccgccacctatgtcgtgttcttgatgtctggtatgacggttttcatcataatctacgaccgtgtcctcgtcccctcgctcaaaagagtgacgggtctagacacggggataacactcttacaaagaataggagctggcattttctttgcggtgttgagtttattggtctccgggttcatagaggaacgtagaagaacctttgcgctgacacgacctacgctggggtcggagcctcgaacaggagagatctcctcaatgtcagcgatgtggctgattccgcagctggtgcttgcaggggtagcagaagcttttgcagccattgggcaaatggagttttactacaagcagtttcctgaaaacatgaagagctttgcgggttctatcttctatgtcggtgcaggagtttctagctacctcgctagcttcttgatctcgactgttcatagaacaactgagcattcacctacggggaattggttagctgaggatctgaacaaagcgaagctggactacttctatttcatgctcacaggactcatgttcgttaactttctttacttcttgttaatggctagatggtatagatacaaaggcactcatgatgaagtcagttatgtggttgacactgttgacgaagagacaaagcaacaagacaagaactctgtctga

SEQ ID NO: 148 - protein, 634 aa, Brassica rapa
MKSRVIHSHRERRDKHNYTQIGTMERKPFDVETTEDHKPYSSVDDGGSDSVDSFENEQKKLVYRGWKVMPFIIGNETFEKIGIIGTLSNLLVYLTSVFNLKSVTAATIINAFSGTINFGTFLAAFLCDTYFGRYKTLSVAVIACFLGSLVILLTAAVPGLHPIPCGTQSSCQGPSEGQIAFLLMGLALLVVGAGGIRPCNLAFGADQFNPKSESGKKGINSFFNWYFFTFTFAQIISLTLVVYIQSNVSWTIGLSIPVGLMFLACVIFFAGHKLYVKVKASGSPLAGIGHVIAAAIKKRGLKPVKQPWIDLYNHIPHNYANSTLKYTDQLRFLDKAAIMTPEDKLNSDGTASDPWKLCTMQKVEEVKCILRVIPIWFACAIYYLAISMQMTYPVFQALQSDRRLGSGGFKIPAATYVVFLMSGMTVFIIIYDRVLVPSLKRVTGLDTGITLLQRIGAGIFFAVLSLLVSGFIEERRRTFALTRPTLGSEPRTGEISSMSAMWLIPQLVLAGVAEAFAAIGQMEFYYKQFPENMKSFAGSIFYVGAGVSSYLASFLISTVHRTTEHSPTGNWLAEDLNKAKLDYFYFMLTGLMFVNFLYFLLMARWYRYKGTHDEVSYVVDTVDEETKQQDKNSV

SEQ ID NO: 149 - DNA, 1905 bp, Brassica oleracea
  CDS (1)..(1905)
atgaagagcagagtcgtcctcagccatagagagagaagagataagcataattatacacagattgaaacaatggagagaaagccctttgatgttgagacaactgaggatcacaaaccctactcctccgtcgatggcggtggttctgattcggtcgattcatttgaagacgagcagaaaaagctcgtttatagaggctggaaagtcatgccctttatcattggtaatgagacatttgagaagatagggatcattgggacactatcaaaccttctggtgtacctaacttcagtattcaaccttcagagtgttacagctgcaaccatcatcaacgccttcagtggcactatcaatttcggcactttcctcgctgctttcctctgcgacacttactttggtcgctacaagactctctctgttgctgtcatcgcctgttttctgggatcgcttgtgatactactgacggctgcagttccaggattgcaccctattccttgtggaacacaaagttcttgccaaggcccaagcgagggccagattgcgtttctgctgatgggtttagcgcttcttgtggtgggtgctggtggaatcaggccgtgtaacttggcctttggtgctgaccagttcaaccccaagtcagaatctggaaagaaaggaatcaacagtttcttcaactggtacttcttcactttcacgttcgcgcagatcatctccctcacgctagttgtgtatatccagtcaaatgtgagctggaccatcggtttgagtatccctgtgggtcttatgttcttggcctgcgtcattttctttgctggtcacaaactgtatgtgaaagtgaaagcctctggtagtccattggctggtataggtcatgttatagccgcagctatcaagaaacgtggcttgaagccagttaagcagccttggatcgatctttacaaccacattcctcctaactatgcaaactctactcttaaatacaccgaccagcttaggtttctagacaaagcagcgattatgacccctgaggacaagttgaactcggatggaacggcttcggatccatggaaattatgtacgatgcagaaagtggaagaagtgaaatgcattttaagagtgattccaatctggttcgcatgcgccatttactaccttgcaataagtatgcaaatgacttatccagtcttccaagctctccagagcgacaggctattaggttcaggtggcttcaagattccagccgccacctatgtcgtgttcttgatgtctggtatgacggttttcatcataatctacgaccgtgtccttgtcccctcgctcaaaagagtgaccggtctagacacggggataacactcttacaaagaataggagctggcattttctttgccgtgttgagtttattggtctccgggtttatagaggaacgtagaagaacctttgcgctgacacgacctacgctcgggtcggagcctcgaacaggagagatctcctcaatgtcagcgatgtggctgattccgcagctggtgcttgcaggggtagcagaagcttttgcagccattgggcaaatggagttttactacaagcagtttcctgaaaacatgaagagctttgcgggttctatcttctatgtcggtggaggagtttctagctacctcgctagcttcttgatctcgactgttcatagaacaactgagcattcacctacggggaattggttagctgaggatctgaacaaagcgaagctggactacttctatttcatgctcacaggactcatgtttgtcaactttctttacttcttgttaatggctagatggtatagatacaaaggcactcatgatgaagtcagttatgtggttgacactgttgacgaagagacgaagcaacaagacaagaactctgtctga

SEQ ID NO: 150 - protein, 634 aa, Brassica oleracea
MKSRVVLSHRERRDKHNYTQIETMERKPFDVETTEDHKPYSSVDGGGSDSVDSFEDEQKKLVYRGWKVMPFIIGNETFEKIGIIGTLSNLLVYLTSVFNLQSVTAATIINAFSGTINFGTFLAAFLCDTYFGRYKTLSVAVIACFLGSLVILLTAAVPGLHPIPCGTQSSCQGPSEGQIAFLLMGLALLVVGAGGIRPCNLAFGADQFNPKSESGKKGINSFFNWYFFTFTFAQIISLTLVVYIQSNVSWTIGLSIPVGLMFLACVIFFAGHKLYVKVKASGSPLAGIGHVIAAAIKKRGLKPVKQPWIDLYNHIPPNYANSTLKYTDQLRFLDKAAIMTPEDKLNSDGTASDPWKLCTMQKVEEVKCILRVIPIWFACAIYYLAISMQMTYPVFQALQSDRLLGSGGFKIPAATYVVFLMSGMTVFIIIYDRVLVPSLKRVTGLDTGITLLQRIGAGIFFAVLSLLVSGFIEERRRTFALTRPTLGSEPRTGEISSMSAMWLIPQLVLAGVAEAFAAIGQMEFYYKQFPENMKSFAGSIFYVGGGVSSYLASFLISTVHRTTEHSPTGNWLAEDLNKAKLDYFYFMLTGLMFVNFLYFLLMARWYRYKGTHDEVSYVVDTVDEETKQQDKNSV

1. A method for modifying the glucosinolate (GSL) content in a Brassicales plant, such as a Brassica plant, or part thereof comprising modifying the functional activity of at least one glucosinolate transport (GTR) protein comprising an amino acid sequence having at least 33% sequence identity with SEQ ID NO: 2 or SEQ ID NO: 142 in cells of said plant or said plant part.

2. The method of claim 1, wherein the GTR protein comprises an amino acid sequence having at least 80% sequence identity with SEQ ID NO: 2, 4, 6, 8, 10, 12, 14, 16, 18, 20, 22, 24, 26, 28, 30, 32, 34, 36, 38, 40, 42, 44, 46, 48, 50, 52, 54, 56, 58, 60, 120, 122, 124, 126, 128 or 130 or 142, 144, 146, 148 or 150.

3. (canceled)

4. (canceled)

5. The method of claim 2, wherein the GTR protein is encoded by a nucleic acid having at least 80% sequence identity with any one of SEQ ID NO: 13, 15, 17, 19, 21, 23, 25, 27, 29, 31, 33, 35, 37, 39, 41, 43, 45, 47, 49, 51, 53, 55, 57, 59, 119, 121, 123, 125, 127, 129, 131, 132, 133, 134, 135, 136 or 137 or 143, 145, 147 or 149.

6. (canceled)

7. The method of claim 1, comprising modifying the functional activity of at least two GTR proteins.

8. The method of claim 7, wherein a first GTR protein comprises an amino acid sequence having at least 80% sequence identity with SEQ ID NO: 2 or SEQ ID NO: 142 and a second GTR protein comprises an amino acid sequence having at least 80% sequence identity with SEQ ID NO: 4.

9. The method of claim 7, wherein said first GTR protein comprises an amino acid sequence having at least 80% sequence identity with any one of SEQ ID NO: 14, 16, 18, 20, 22, 24, 38, 40, 42, 50, 52 or 54 or 144, 146, 148 or 150 and wherein said second GTR protein comprises an amino acid sequence having at least 80% sequence identity with any one of SEQ ID NO: 26, 28, 30, 32, 34, 36, 44, 46, 48, 56, 58, 60, 120, 122, 124, 126, 128, or 130.

10. (canceled)

11. The method of claim 7, wherein said first GTR protein is encoded by a nucleic acid having at least 80% sequence identity with any one of SEQ ID NO: 13, 15, 17, 19, 21, 23, 37, 39, 41, 49, 51, 53 or 137 or 143, 145, 147 or 149 and wherein said second GTR protein is encoded by a nucleotide sequence having at least 80% sequence identity with any of SEQ ID NO: 25, 27, 29, 31, 33, 35, 43, 45, 47, 55, 57, 59, 119, 121, 123, 125, 127, 129, 131, 132, 133, 134, 135, 136.

12. (canceled)

13. The method of claim 1, wherein the GSL content is decreased in plant seed.

14. A method to reduce GTR activity in a cell of a plant, such as a Brassica plant, comprising introducing an RNA molecule in said plant or plant part, wherein said RNA molecule comprises a GTR-inhibitory RNA molecule capable of down-regulating the expression of said GTR gene.

15. The method of claim 14, comprising introducing a chimeric DNA construct in said plant or plant part, wherein said chimeric DNA construct comprises the following operably linked DNA regions:
a) a promoter, operative in said plant or plant part;
b) a transcribed DNA region, which when transcribed yields a GTR-inhibitory RNA molecule, said GTR-inhibitory RNA molecule being capable of down-regulating the expression of said GTR gene;
c) a DNA region involved in transcription termination and polyadenylation.

16. A method to reduce GTR activity in a cell of a plant, such as a Brassica plant, comprising altering the nucleotide sequence of the endogenous GTR gene.

17. The method according to claim 16 wherein the GTR protein is a protein comprising the amino acid sequence of SEQ ID NO: 2 or SEQ ID NO: 142 with any of the following substitutions:
a. S at position 22 for A (position 52 for SEQ ID NO:142)
b. S at position 22 for D (position 52 for SEQ ID NO:142)
c. T at position 105 for A (position 135 for SEQ ID NO:142)
d. T at position 105 for D (position 135 for SEQ ID NO:142)
e. S at position 605 for A (position 635 for SEQ ID NO:142)
f. S at position 605 for D (position 635 for SEQ ID NO:142)
or the GTR protein is a protein with the amino acid sequence of SEQ ID NO: 4 with the following substitutions:
g) T at position 58 for A
h) T at position 58 for D
i) T at position 117 for A
j) T at position 117 for D
k) T at position 323 for A
l) T at position 323 for D
or the GTR protein is encoded by a nucleic acid of SEQ ID NO:25
m) comprising a stop codon at position 1241 to 1243
or GTR protein is encoded by a nucleic acid of SEQ ID NO:31
n) comprising a stop codon at position 929 to 931
o) comprising a stop codon at position 1145 to 1147.
or GTR protein is encoded by a nucleic acid of SEQ ID NO:27
p) comprising a stop codon at position 870 to 872
q) comprising a stop codon at position 1380 to 1382
or the GTR protein is encoded by a nucleic acid of SEQ ID NO:33
r) comprising a stop codon at position 780 to 782.
or the GTR protein is a protein with the amino acid sequence of SEQ ID NO:66 comprising a mutation at any of the following positions:
s) Gly 126
t) Gly 145
u) Glu 192
v) Trp 229
w) Ser 359

18. (canceled)

19. A plant or plant part obtainable by the method of claim 1.

20. Seed from the plant of claim 19.

21. (canceled)

22. An isolated DNA sequence encoding the amino acid sequence of SEQ ID NO: 2, 4, 6, 8, 10, 12, 14, 16, 18, 20, 22, 24, 26, 28, 30, 32, 34, 36, 38, 40, 42, 44, 46, 48, 50, 52, 54, 56, 58, 60, 120, 122, 124, 126, 128 or 130, or −142, 144, 146, 148 or 150.

23. (canceled)

24. An isolated DNA sequence comprising the nucleotide sequence of SEQ ID NO: 25, 27, 29, 31, 33, 35, 43, 45, 47, 55, 57, 59, 119, 121, 123, 125, 127, 129, 131, 132, 133, 134, 135, 136 or 143, 145, 147 or 149.

25. A chimeric gene comprising the following operably linked DNA fragments:
a) a heterologous plant expressible promoter;
b) a DNA region encoding the amino acid sequence of SEQ ID NO: 2, 4, 6, 8, 10, 12, 14, 16, 18, 20, 22, 24, 26, 28, 30, 32, 34, 36, 38, 40, 42, 44, 46, 48, 50, 52, 54, 56, 58, 60, 120, 122, 124, 126, 128, 130 or 142 or 144, 146, 148 or 150;
c) a transcription termination and polyadenylation signal functional in plant cells.

26. A plant comprising the chimeric gene of claim 25.

27. An isolated protein comprising the amino acid sequence of SEQ ID NO: 2, 4, 6, 8, 10, 12, 14, 16, 18, 20, 22, 24, 26, 28, 30, 32, 34, 36, 38, 40, 42, 44, 46, 48, 50, 52, 54, 56, 58, 60, 120, 122, 124, 126, 128, 130 or 142 or 144, 146, 148 or 150.

28. A mutant GTR allele encoding a GTR protein comprising an amino acid sequence having at least 80% sequence identity with SEQ ID NO: 2 or SEQ ID NO: 142 with any one of the following substitutions:
a) S at position 22 for A (position 52 for SEQ ID NO:142)
b) S at position 22 for D (position 52 for SEQ ID NO:142)
c) T at position 105 for A (position 135 for SEQ ID NO:142)
d) T at position 105 for D (position 135 for SEQ ID NO:142)
e) S at position 605 for A (position 635 for SEQ ID NO:142)
f) S at position 605 for D (position 635 for SEQ ID NO:142)
or a GTR protein having at least 80% sequence identity with the amino acid sequence of SEQ ID NO: 4 with the following substitutions:
g) T at position 58 for A
h) T at position 58 for D
i) T at position 117 for A
j) T at position 117 for D
k) T at position 323 for A
l) T at position 323 for D
or a mutant GTR allele having at least 80% sequence identity with the nucleic acid of SEQ ID NO: 25 comprising a stop codon at position 1241 to 1243;
or mutant GTR allele having at least 80% sequence identity with the nucleic acid of SEQ ID NO: 31
m) comprising a stop codon at position 929 to 931
n) comprising a stop codon at position 1145 to 1147
or a mutant GTR allele having at least 80% sequence identity with the nucleic acid of SEQ ID NO: 27
o) comprising a stop codon at position 870 to 872
p) comprising a stop codon at position 1380 to 1382
or a mutant GTR allele having at least 80% sequence identity with the nucleic acid of SEQ NO: 33
q) comprising a stop codon at position 780 to 782.
Or a mutant GTR allele encoding a GTR protein having at least 80% sequence identity with the amino acid sequence of SEQ ID NO: 66 comprising a mutation at any of the following positions:
r) Gly 126
s) Gly 145Glu 192
t) Trp 229
u) Ser 359

29. A plant or plant part obtainable by the method of claim 14.

30. Seed from the plant of claim 29.

31. A plant or plant part obtainable by the method of claim 16.

32. Seed from the plant of claim 31.
